(19) United States
(12) Patent Application Publication
(10) Pub. No.: US 2022/0119492 A1
(43) Pub. Date: Apr. 21, 2022

(54) IL-2R-BETA-GAMMA BINDING COMPOUNDS AND USES THEREOF

(71) Applicant: MEDIKINE, INC., Menlo Park, CA (US)

(72) Inventors: WILLIAM J. DOWER, MENLO PARK, CA (US); MICHAEL C. NEEDELS, MENLO PARK, CA (US); RONALD W. BARRETT, MENLO PARK, CA (US); ALICE V. BAKKER, MENLO PARK, CA (US); STEVEN E. CWIRLA, MENLO PARK, CA (US)

(21) Appl. No.: 17/519,278

(22) Filed: Nov. 4, 2021

Related U.S. Application Data
(63) Continuation-in-part of application No. 17/089,515, filed on Nov. 4, 2020.
(60) Provisional application No. 62/930,758, filed on Nov. 5, 2019.

(51) Int. Cl. C07K 14/715; C07K 14/00

(52) U.S. Cl. CPC C07K 14/7155; A61K 38/00; C07K 14/001

(57) ABSTRACT

IL-2Rβγc binding compounds, and pharmaceutical compositions comprising the IL-2Rβγc binding compounds are disclosed. IL-2Rβγc binding compounds can act as IL-2R agonists and are useful in treating cancer, an autoimmune disease, and an inflammatory disease.

[0001] This application is a continuation-in-part of U.S. application Ser. No. 17/089,515, filed on Nov. 4, 2020, which claims the benefit under 35 U.S.C. § 119(e) of U.S. Provisional Application No. 62/930,758, filed on Nov. 5, 2019, each of which is incorporated by reference in its entirety.

### FIELD

[0002] The present disclosure relates to cross species IL-2Rβγc binding compounds. The cross-species IL-2Rβγc binding compounds can act as IL-2R agonists or partial IL-2R agonists.

### SEQUENCE LISTING

[0003] The Sequence Listing associated with this application is filed in electronic format via EFS-Web and is incorporated by reference in its entirety. Said ASCII copy, created on Dec. 15, 2021, is named 62AJ-001100US-341101_SL.txt and is 935,420 bytes in size.

### BACKGROUND

[0004] Recombinant human Interleukin-2 (IL-2) was one of the first immuno-oncology agents studied in the clinic and was approved by the FDA in the 1990s for use against some particularly challenging cancers such as melanoma and renal carcinoma. IL-2 is effective, producing durable responses in up to 10% of patients with these tumors, but its utility is limited by very serious, dose-limiting toxicities. In addition, the efficacy of IL-2 in directing T-cell-mediated anti-tumor response is compromised by concurrent IL-2-driven upregulation of T-cell suppressive systems. There has been a continuing search for strategies to reduce the toxicity of IL-2 therapy, and to avoid the immunosuppressive limitations on anti-tumor activity. To date, modestly effective strategies have been developed to control systemic exposure, and thus toxicity, of this potent biologic. Elucidation of the complicated biology of IL-2 has led to modifications of the natural IL-2 molecule to alter the balance of tumor toxicity and suppression. However, these approaches are limited by the use of natural IL-2 as a template, thus retaining elements of the undesirable, structure-driven bioactivities of the parent molecule.

[0005] Crucial to its anti-tumor properties, IL-2 exerts potent stimulatory effects on NK and cytotoxic CD8+ T-cells. However, the anti-tumor effects are paradoxically suppressed by IL-2-directed stimulation of T-regulatory cells (Tregs), which effectively blunts the anti-tumor immune response. This dual effect of IL-2 is largely controlled by the nature of the IL-2 receptor (IL-2R) subunits expressed on the various cells responsible for immune homeostasis. IL-2 is recognized by combinations of three receptor subunits, which are differentially and conditionally expressed on many types of immune cells. The two signaling subunits, known as IL-2Rβ (β) and IL-2Rγ-common (γc), initiate signaling when brought into correctly oriented apposition by binding to IL-2. IL-2 binds to IL-2Rβγc with an IC₅₀ of about 1 nM to form an active ternary complex. Most immune cells express, at various levels, the IL-2Rβ and IL-2Rγc subunits. There is also a third, non-signaling IL-2R subunit, IL-2Rα (CD25), which is expressed on a subset of immune cells, notably Tregs. The complex of IL-2Rαβγc has a very high affinity for IL-2 (about 10 pM), and cells expressing all three subunits are therefore much more sensitive to IL-2. A popular and well-supported strategy for improving the efficacy of IL-2R agonists against tumors involves engineering IL-2R selectivity to reduce the binding of IL-2 to the IL-2Rα subunit while maintaining IL-2Rβγc binding and signaling to favor infiltration and stimulation of cytotoxic effector T-cells (Teff cells) over Tregs at tumor sites.

[0006] The cause of IL-2 toxicity in the clinical setting is less well understood; but is thought to be the result of exaggerated peripheral immuno-stimulation of IL-2Rβγc-expressing T-cells accompanied by excessive release of inflammatory cytokines. Toxicity is induced by the frequent administration of high doses of IL-2 required to sustain adequate tumor exposure because of the short half-life of the natural cytokine.

[0007] Strategies to address the limitations of IL-2 as a useful immuno-oncology therapy utilize mutants, fusion proteins, or chemically modified IL-2 to alter the complex biology of the immune regulator. However, it is difficult to optimize selective IL-2Rβγc binding and signaling of modified IL-2 during pre-clinical and clinical development. This limits the use of a bioactive IL-2 protein as a starting point for imparting multiple new properties.

### SUMMARY

[0008] According to the present invention an IL-2Rβ ligand is selected from: an amino acid sequence of any one of any one of SEQ ID NOS: 2661-2891, 2900-2926, 911-930, 9301, 9308, 2859, 2934, 3100-3128, 3130-3151, 3160-3166, 3170-3186, and 3200-3207; a truncated amino acid sequence of any of SEQ ID NOS: 2661-2891, 2900-2926, 911-930, 9301, 9308, 2859, 2934, 3100-3128, 3130-3151, 3160-3166, 3170-3186, and 3200-3207; an amino acid sequence of any one of SEQ ID NOS: 2661-2891, 2900-2926, 911-930, 9301, 9308, 2859, 2934, 3100-3128, 3130-3151, 3160-3166, 3170-3186, and 3200-3207; having from 1 to 4 amino acid substitutions, an amino acid sequence of any one of SEQ ID NOS: 2661-2891, 2900-2926, 911-930, 9301, 9308, 2859, 2934, 3100-3128, 3130-3151, 3160-3166, 3170-3186, and 3200-3207 having from 1 to 4 flanking glycines (SEQ ID NO: 9429); an amino acid sequence having greater than 60% sequence similarity to any one of SEQ ID NOS: 2661-2891, 2900-2926, 911-930, 9301, 9308, 2859, 2934, 3100-3128, 3130-3151, 3160-3166, 3170-3186, and 3200-3207; or a combination of any of the foregoing, wherein the IL-2Rβ ligand binds to the hu-IL-2Rβ subunit with an IC50 less than 100 μM as determined using a phage ELISA competition assay.

[0009] According to the present invention an IL-2Rβ binding compound comprises the IL-2Rβ ligand according to the present invention.

[0010] According to the present invention an IL-2Rβγc ligand comprises the IL-2Rβ ligand according to the present invention; and an IL-2Rγc ligand, wherein the IL-2Rγc ligand comprises: an amino acid sequence of any one of any one of SEQ ID NOS: 944-1028, 1032-1060, and 1601-1613; a truncated amino acid sequence of any of SEQ ID NOS: 944-1028, 1032-1060, and 1601-1613; an amino acid sequence of any one of SEQ ID NOS: 944-1028, 1032-1060, and 1601-1613 having from 1 to 4 amino acid substitutions, an amino acid sequence of any one of SEQ ID NOS: 944-1028, 1032-1060, and 1601-1613 having from 1 to 4 flanking glycines (SEQ ID NO: 9429); an amino acid sequence having greater than 60% sequence similarity to any one of SEQ ID NOS: 944-1028, 1032-1060, and 1601-1613; or a combination of any of the foregoing, wherein the IL-2Rγc ligand binds to the hu-IL-2Rγc subunit with an IC50 less than 100 μM as determined using a phage ELISA competition assay.

[0011] According to the present invention, pharmaceutical compositions comprise: an IL-2Rβ ligand according to the present invention; an IL-2Rβ binding compound according to the present invention; an IL-2Rβγc ligand according to the present invention; an IL-2Rβγc binding compound according to the present invention; or a combination of any of the foregoing.

[0012] According to the present invention, methods of treating a disease in a patient comprise administering to a patient in need of such treatment a therapeutically effective amount of: the IL-2Rβ ligand according to the present invention; an IL-2Rβ binding compound according to the present invention; an IL-2Rβγc ligand according to the present invention; an IL-2Rβγc binding compound according to the present invention; or the pharmaceutical composition according to the present invention.

[0013] According to the present invention, methods of expanding immune cells comprise contacting a population of immune cells ex vivo or in vivo with an effective amount of an IL-2Rβ ligand according to the present invention; an IL-2Rβ binding compound according to the present invention; an IL-2Rβγc ligand according to the present invention; or an IL-2Rβγc binding compound according to the present invention.

[0014] According to the present invention, methods of expanding immune cells comprise contacting a population of immune cells ex vivo or in vivo with an effective amount of: an IL-2Rβ ligand according to the present invention; an IL-2Rβ binding compound according to the present invention; the IL-2Rβγc ligand according to the present invention; or an IL-2Rβγc binding compound according to the present invention.

[0015] According to the present invention, methods of boosting a vaccine comprise administering to a patient a vaccine and a therapeutically effective amount of: an IL-2Rβ ligand according to the present invention; an IL-2Rβ binding compound according to the present invention; an IL-2Rβγc ligand according to the present invention; or an IL-2Rβγc binding compound according to the present invention.

[0016] According to the present invention, methods of modifying the immune response comprise administering to a patient an effective amount of: an IL-2Rβ ligand according to the present invention; an IL-2Rβ binding compound according to the present invention; an IL-2Rβγc ligand according to the present invention; or an IL-2Rβγc binding compound according to the present invention.

[0017] According to the present invention a nucleic acid encoding for a polypeptide comprises: an IL-2Rβ ligand according to the present invention; an IL-2Rβ binding compound according to the present invention; an IL-2Rβγc ligand according to the present invention; or an IL-2Rβγc binding compound according to the present invention.

### BRIEF DESCRIPTION OF THE DRAWINGS

[0018] The drawings described herein are for illustration purposes only. The drawings are not intended to limit the scope of the present disclosure.

[0019] FIG. 1 shows examples of IL-2Rβγc ligands having different C/N orientations of an IL-2Rβ ligand and an IL-2Rγc ligand.

[0020] FIG. 2 shows STAT5 phosphorylation in TF-1β cells exposed to various IL-2Rβγc ligands having different IL-2Rβ and IL-2Rγc ligands with different C/N orientations and different ligand linker lengths.

[0021] FIG. 3 shows STAT5 phosphorylation in NK-92 cells exposed to various IL-2Rβγc ligands having different IL-2Rβ and IL-2Rγc ligands with a C/C orientation and with the same IL-2Rβγc ligand linker.

[0022] FIG. 4 shows STAT5 phosphorylation in NK-92 cells exposed to IL-2Rβγc ligands having an IL-2Rβ ligand having SEQ ID NO: 865 (BL4) and an IL-2Rγc ligand of SEQ ID NO: 965 (GL2), with different C/N orientations.

[0023] FIGS. 5A and 5B show STAT5 phosphorylation in TF-1β cells exposed to IL-2Rβγc ligands having different IL-2Rβ and IL-2Rγc ligands with a C/N orientation and with the same IL-2Rβγc ligand linker. In FIG. 5A the IL-2Rβ ligand is (BL4) (SEQ ID NO: 865) and is coupled to different IL-2Rγc ligands. In FIG. 5B the IL-2Rγc ligand is (GL2) (SEQ ID NO: 965) and is coupled to different IL-2Rβ ligands.

[0024] FIG. 6 shows STAT5 phosphorylation in NK-92 cells exposed to IL-2Rβγc ligands having an IL-2Rβ ligand having SEQ ID NO: 865 (BL4) and an IL-2Rγc ligand of SEQ ID NO: 965 (GL2), having either a -GGGGS- (G4S) (SEQ ID NO: 9395) amino acid linker (IL-2Rβγc ligand (BGL21)) or a click chemistry-derived triazole-containing linker (IL-2Rβγc ligand (BGL20)).

[0025] FIGS. 7A-7C show STAT5 phosphorylation in NK-92 cells, AKT phosphorylation in NK-92 cells, and ERK1/2 phosphorylation in NK-92 cells, respectively, following exposure to either IL-2Rβγc ligand (BGL21) or to IL-2.

[0026] FIGS. 8A and 8B show NK-92 cell proliferation following exposure to either IL-2 or to IL-2Rβγc ligand (BGL21) in terms of viable cell number or % Ki-67+ cells, respectively.

[0027] FIGS. 9A-9C show STAT5 phosphorylation in resting CD8+ T-cells, Treg cells, or CD4+ T-cells, respectively, following exposure to either IL-2 or to IL-2Rβγc ligand (BGL21).

[0028] FIGS. 10A and 10B show proliferation of NK-92 cells following exposure to either IL-2 or to IL-2Rβγc ligand (BGL21) in terms of % Ki-67+ cells and median fluorescence intensity, respectively.

[0029] FIG. 11A shows the upregulation of PD-L1 expression in A549 tumor cells following co-culture with PBMCs and either IL-2 or IL-2Rβγc ligand (BGL21).

[0030] FIGS. 11B and 11C show the % cytotoxicity in LS180 cells and the % cytotoxicity in COLO205 cells, respectively, following co-culture with PBMCs and either IL-2 or IL-2Rβγc ligand (BGL21).

[0031] FIG. 12 shows the STAT5 phosphorylation in TF-1β cells following exposure to IL-2 or to various IL-2Rβγc ligand (BGL21)-fusion proteins.

[0032] FIG. 13 shows the STAT5 phosphorylation in TF-1β cells following exposure to IL-2 or to various IL-2Rβγc ligand-Fc fusion proteins having different IL-2Rβγc ligands.

[0033] FIG. 14 shows the STAT5 phosphorylation in TF-1β cells following exposure to various IL-2Rβγc ligand (BGL21)-Fc fusion proteins derived from different IgG isotypes.

[0034] FIG. 15 shows the STAT5 phosphorylation in TF-1β cells following exposure to IL-2Rβγc ligand (BGL21)-Fc fusion proteins having different Fc linkers.

[0035] FIGS. 16A and 16B show the STAT5 phosphorylation in TF-1β cells (FIG. 16A) or % Ki-67 activity (FIG. 16B) in NK-92 cells following exposure to IL-2Rβγc ligand (BGL21) or to IL-2Rβγc ligand (BGL21)-Fc fusion proteins having different Fc linkers.

[0036] FIGS. 17A-17D show PD-1 binding affinity (FIGS. 17A and 17C) and IL-2R agonist activity as determined by STAT5 phosphorylation (FIGS. 17B and 17D) in TF-1β cells following exposure to an anti-PD-1 antibody (pembrolizumab or cemiplimab), to an IL-2Rβγc ligand (BGL21)-Fc fusion protein (FP1) (SEQ ID NO: 1212), or to an IL-2Rβγc ligand (BGL21)-anti-PD-1 antibody (FP8) (SEQ ID NO: 1219) and (FP10) (SEQ ID NO: 1221).

[0037] FIG. 18 shows the STAT5 phosphorylation in NK-92 cells following exposure to IL-2, to IL-2Rβγc ligand (BGL21), or to PEGylated IL-2Rβγc ligand (BGL21).

[0038] FIGS. 19A-19C show the amino acid sequences and linker structures for certain IL-2Rβγc ligands provided by the present disclosure. As shown in FIGS. 19A-19C, the IL-2Rβ ligand is coupled to the IL-2Rγc ligand through the linker structure (L). For example, in IL-2Rβγc ligand (BGL1) the C terminus of an IL-2Rβ ligand having SEQ ID NO: 58 is coupled to the C terminus of an IL-2Rγc ligand having SEQ ID NO: 224 through a linker having the structure (L2). As described, IL-2Rβγc ligand (BGL1) is synthesized by reacting an IL-2Rβ ligand having SEQ ID NO: 58 with an H2N-group on the N terminus and an alkyne moiety (AL1) on the C terminus, with an IL-2Rγc ligand having SEQ ID NO: 224 with an H₂N-group on the N terminus and an azide moiety (AZ1) on the C terminus.

[0039] FIGS. 20A-20J show the amino acid sequences for certain IL-2Rβγc ligand fusion proteins provided by the present disclosure.

[0040] FIGS. 21A-21C provides a summary of the sub-structures for the IL-2Rβγc ligand constructs provided in FIGS. 20A-20J. FIGS. 21A-C discloses “(G45)₂” as SEQ ID NO: 9396, “(G45)₃” as SEQ ID NO: 9397, “(GS)₁₀” as SEQ ID NO: 9407, “(PA)₁₀” as SEQ ID NO: 9428, “(G4S)₁” as SEQ ID NO: 9395, “(GGS)₁” as SEQ ID NO: 9402, “(G45)₄” as SEQ ID NO: 9398, “(G)₂” as SEQ ID NO: 9399, “(G)₅” as SEQ ID NO: 9401, “(PA)₅” as SEQ ID NO: 9426 and “(PA)₇” as SEQ ID NO: 9427.

[0041] FIGS. 22A-22F show examples of various configurations of IL-2Rβγc ligand fc-fragment fusion proteins provided by the present disclosure.

[0042] FIGS. 23A-23F show examples of various configurations of IL-2Rβγc ligand immunoglobulin fusion proteins provided by the present disclosure.

[0043] FIG. 24 shows the STAT5 phosphorylation in NK-92 cells following exposure to a pH-biased IL-2Rβγc ligand at pH 6.0 and at pH 7.5.

[0044] FIG. 25 shows the normalized ELISA signal for competition binding of a pH-biased IL-2Rβγc ligand at pH 6.0 and pH 7.4 to the IL-2Rβ subunit.

[0045] FIG. 26 shows a PK profile of a PEG-IL-2Rβγc ligand construct (PEG-1) following administration to mice.

[0046] FIGS. 27-33 show examples of PEG-IL-2Rβγc ligand constructs PEG-1 to PEG-7, respectively. The IL-2Rβγc ligand has SEQ ID NO: 1263.

[0047] FIGS. 34A-34B show STAT5 phosphorylation in activated human PBMCs and human IL-2Rβ transfected TF-1 cells, respectively, following exposure to IL-2 or a hu-IgG2/IL-2Rβγc Fc-fusion protein having SEQ ID NO: 8135.

[0048] FIGS. 34C-34D show STAT5 phosphorylation in activated cyno-PBMCs and cyno-IL-2Rβ transfected TF-1 cells, respectively, following exposure to IL-2 or a hu-IgG2/IL-2Rβγc Fc-fusion protein having SEQ ID NO: 8135.

[0049] FIGS. 35A-35B show competitive binding of an IL-2Rβγc ligand having SEQ ID NO: 1263 to the human-IL-2Rγc subunit and to the human-IL-2Rβ subunit, respectively. FIGS. 35C-35D show competitive binding of an IL-2Rβγc ligand having SEQ ID NO: 1263 to the cyano-IL-2Rγc subunit and to the cyno-IL-2Rβ subunit, respectively.

[0050] FIGS. 36A-36B show competition binding of an IL-2Rβγc ligands having SEQ ID NO: 4171 and SEQ ID NO: 1263 to the cyno-IL-2Rβ subunit and to the cyno-IL-2Rγc subunit, respectively.

[0051] FIGS. 37A-37B show competition binding of an IL-2Rβγc ligands having SEQ ID NO: 4171 and SEQ ID NO: 1263 to the hu-IL-2Rβ subunit and to the hu-IL-2Rγc subunit, respectively.

[0052] FIG. 38A shows a schematic diagram of an IL-2Rβγc Fc fusion provided by the present disclosure.

[0053] FIG. 38B shows STAT5 phosphorylation in activated cyno-PBMC cells following exposure to IL-2 or to a hu-IgG2/IL-2Rβγc Fc-fusion proteins having SEQ ID NO: 8127

[0054] FIGS. 39A-39B show STAT5 phosphorylation in hu-TF-1β cells following exposure to peptides or to Fc fusions comprising the peptides, respectively.

[0055] FIGS. 40A-40B show STAT5 phosphorylation in activated hu-PBMC cells following exposure to peptides or to Fc fusions comprising the peptides, respectively.

[0056] FIG. 41 shows STAT5 phosphorylation in TF-1β cells following exposure to rh-IL-2 and to various hu-IgG2/IL-2Rβγc Fc-fusion proteins.

### DETAILED DESCRIPTION

[0057] A dash (“-”) that is not between two letters or symbols is used to indicate a point of attachment for a moiety or substituent. For example, —CONH₂ is attached through the carbon atom and —X¹—X²-denotes amino acids X¹ and X² covalently bound through a single bond.

[0058] “Alkyl” refers to a saturated, branched, or straight-chain, monovalent hydrocarbon radical derived by the removal of one hydrogen atom from a single carbon atom of a parent alkane, alkene, or alkyne. Examples of alkyl groups include methyl; ethyls such as ethanyl, ethenyl, and ethynyl; propyls such as propan-1-yl, propan-2-yl, prop-1-en-1-yl, prop-1-en-2-yl, prop-2-en-1-yl (allyl), prop-1-yn-1-yl, prop-2-yn-1-yl, etc.; butyls such as butan-1-yl, butan-2-yl, 2-methyl-propan-1-yl, 2-methyl-propan-2-yl, but-1-en-1-yl, but-1-en-2-yl, 2-methyl-prop-1-en-1-yl, but-2-en-1-yl, but-2-en-2-yl, buta-1,3-dien-1-yl, buta-1,3-dien-2-yl, but-1-yn-1-yl, but-1-yn-3-yl, but-3-yn-1-yl, etc.; and the like. The term “alkyl” is specifically intended to include groups having any degree or level of saturation, i.e., groups having exclusively carbon-carbon single bonds, groups having one or more carbon-carbon double bonds, groups having one or more carbon-carbon triple bonds, and groups having combinations of carbon-carbon single, double, and triple bonds. Where a specific level of saturation is intended, the terms alkanyl, alkenyl, and alkynyl are used. In certain embodiments, an alkyl group is C₁₋₆ alkyl, C₁₋₅ alkyl, C₁₋₄ alkyl, C₁₋₃ alkyl, and in certain embodiments, ethyl or methyl.

[0059] “Cycloalkyl” refers to a saturated or partially unsaturated cyclic alkyl radical. In certain embodiments, a cycloalkyl group is C₃₋₆ cycloalkyl, C₃₋₅ cycloalkyl, C₅₋₆ cycloalkyl, cyclopropyl, cyclopentyl, and in certain embodiments, cyclohexyl. In certain embodiments, cycloalkyl is selected from cyclopropyl, cyclobutyl, cyclopentyl, and cyclohexyl.

[0060] “Heterocycloalkyl” by itself or as part of another substituent refers to a saturated or unsaturated cyclic alkyl radical in which one or more carbon atoms (and certain associated hydrogen atoms) are independently replaced with the same or different heteroatom; or to a parent aromatic ring system in which one or more carbon atoms (and certain associated hydrogen atoms) are independently replaced with the same or different heteroatom such that the ring system violates the Hückel-rule. Examples of heteroatoms to replace the carbon atom(s) include N, P, O, S, and Si. Examples of heterocycloalkyl groups include groups derived from epoxides, azirines, thiiranes, imidazolidine, morpholine, piperazine, piperidine, pyrazolidine, pyrrolidine, quinuclidine, and the like. In certain embodiments, heterocycloalkyl is C₅ heterocycloalkyl and is selected from pyrrolidinyl, tetrahydrofuranyl, tetrahydrothiophenyl, imidazolidinyl, oxazolidinyl, thiazolidinyl, doxolanyl, and dithiolanyl. In certain embodiments, heterocycloalkyl is C₆ heterocycloalkyl and is selected from piperidinyl, tetrahydropyranyl, piperizinyl, oxazinyl, dithianyl, and dioxanyl. A heterocycloalkyl group can be C₃₋₆ heterocycloalkyl, C₃₋₅ heterocycloalkyl, C₅₋₆ heterocycloalkyl, and in certain embodiments, C₅ heterocycloalkyl or C₆ heterocycloalkyl. A heteroatomic group can be selected from —O—, —S—, —NH—, —N(—CH₃)—, —SO—, and —SO₂—, in certain embodiments, the heteroatomic group is selected from —O— and —NH—, and in certain embodiments the heteroatomic group is —O— or —NH—.

[0061] “Binding affinity” refers to the strength of the binding interaction between a single biomolecule and its ligand/binding partner. Binding affinity is expressed as the IC₅₀.

[0062] “Binding ratio” refers to a measure of the relative binding of two ligands expressed as a ratio. For example, the “IL-2R subunit binding ratio” refers to the ratio of the IC50 for binding of an IL-2Rβ ligand to the IL-2Rβ subunit to the IC50 for the binding of an IL-2Rγc ligand to the IL-2Rγc subunit. For example, a hu-IL-2R subunit binding ratio refers to the ratio of the IC50 for binding of an IL-2Rβ ligand to the hu-IL-2Rβ subunit to the IC50 for the binding of an IL-2Rγc ligand to the hu-IL-2Rγc subunit. For example, a cyno-IL-2R subunit binding ratio refers to the ratio of the IC50 for binding of an IL-2Rβ ligand to the cyno-IL-2Rβ subunit to the IC50 for the binding of an IL-2Rγc ligand to the cyno-IL-2Rγc subunit. The “IL-2R binding ratio” refers to the ratio of the IC50 for binding of an IL-2Rβ ligand to IL-2R to the IC50 for the binding of an IL-2Rγc ligand to IL-2R. The hu-IL-2R binding ratio refers to the ratio of the IC50 for binding of an IL-2Rβ ligand to hu-IL-2R to the IC50 for the binding of an IL-2Rγc ligand to hu-IL-2R. The cyno-IL-2R binding ratio refers to the ratio of the IC50 for binding of an IL-2Rβ ligand to cyno-IL-2R to the IC50 for the binding of an IL-2Rγc ligand to cyno-IL-2R. The binding ratio of the IL-2Rβ ligand and the IL-2Rγc ligand can be determined as for the independent ligands or for the ligands when combined as in an IL-2Rβγc binding compound such as an IL-2Rβγc ligand or an IL-2Rβγc construct.

[0063] “Agonist” refers to a biologically active ligand which binds to its complementary biologically active receptor or subunit(s) and activates the receptor to cause a biological response mediated by the receptor, or to enhance a preexisting biological activity mediated by the receptor.

[0064] “Partial agonist” refers to a compound that provides a level of activation, that is, for example, less than 75% of maximum activation, less than 50%, less than 25%, less than 10%, or less than 1% of the maximum activation. A partial IL-2R agonist exhibits a level of activation that is less than the level of activation provided by IL-2. For example, a partial IL-2R agonist exhibits a level of activation that is less than the level of activation provided by IL-2 and a partial IL-2R agonist exhibits a level of activation that is less than the level of activation provided by IL-2.

[0065] “Antagonist” refers to a biologically active ligand or compound that binds to its complementary receptor or subunit(s) and blocks or reduces a biological response of the receptor. For example, an IL-2R antagonist binds to IL-2R with an IC₅₀ of less than 100 μM and inhibits functional activity of IL-2 as determined, for example, using any of the functional assays disclosed in the examples. For example, an IL-2R antagonist binds to IL-2R with an IC₅₀ of less than 100 μM and inhibits functional activity of IL-2 as determined, for example, using any of the functional assays disclosed in the examples.

[0066] Amino acid residues are abbreviated as follows: alanine is Ala or A; arginine is Arg or R; asparagine is Asn or N; aspartic acid is Asp or D; cysteine is Cys or C; glutamic acid is Glu or E; glutamine is Gln or Q; glycine is Gly or G; histidine is His or H; isoleucine is Ile or I; leucine is Leu or L; lysine is Lys or K; methionine is Met or M; phenylalanine is Phe or F; proline is Pro or P; serine is Ser or S; threonine is Thr or T; tryptophan is Trp or W; tyrosine is Tyr or Y; and valine is Val or V.

[0067] “Non-natural amino acids” include, for example, β-amino acids, homo-amino acids, proline and pyruvic acid derivatives, histidine derivatives with alkyl or heteroatom moieties attached to the imidazole ring, amino acids with pyridine-containing side chains, 3-substituted alanine derivatives, glycine derivatives, ring-substituted phenylalanine and tyrosine derivatives, and N-methyl amino acids.

[0068] Amino acids having a large hydrophobic side chain include isoleucine (I), leucine (L), methionine (M), valine (V), phenylalanine (F), tyrosine (Y), and tryptophan (W).

[0069] Amino acids having a small hydrophobic side chain include alanine (A), glycine (G), proline (P), serine (S), and threonine (T).

[0070] Amino acids having a basic side chain include arginine (R), lysine (K), and histidine (H).

[0071] Amino acids having an acidic side chain include aspartate (D) and glutamate (E).

[0072] Amino acids having a polar/neutral side chain include histidine (H), asparagine (N), glutamine (Q), serine (S), threonine (T), and tyrosine (Y).

[0073] Amino acids having an aromatic side chain include phenylalanine (F), histidine (H), tryptophan (W), and tyrosine (Y).

[0074] Amino acids having a hydroxyl side chain include serine (S), threonine (T), and tyrosine (Y).

[0075] “Conservative amino acid substitution” means that amino acids within each of the following groups can be substituted with another amino acid within the group: amino acids having a small hydrophobic side chain comprising alanine (A), glycine (G), proline (P), serine (S), and threonine (T); amino acids having a hydroxyl-containing side chain comprising serine (S), threonine (T), and tyrosine (Y); amino acids having an acidic side chain comprising aspartate (D) and glutamate (E); amino acids comprising a polar-neutral side chain comprising histidine (H), asparagine (N), glutamine (Q), serine (S), threonine (T), and tyrosine (Y); amino acids having a basic side chain comprising arginine (R), lysine (K), and histidine (H); amino acids having a large hydrophobic side chain comprising isoleucine (I), leucine (L), methionine (M), valine (V), phenylalanine (F), tyrosine (Y), and tryptophan (W)); and amino acids having an aromatic side chain comprising phenylalanine (F), histidine (H), tryptophan (W), and tyrosine (Y).

[0076] “PEG,” “polyethylene glycol” and “poly(ethylene glycol)” refer to any suitable nonpeptidic water-soluble poly(ethylene oxide). PEGs can comprise a structure —(OCH₂CH₂)ₙ— where n is, for example, an integer from 1 to 4,000. A PEG can also include moieties such as —CH₂CH₂—O(CH₂CH₂O)ₙ—CH₂CH₂— and/or —(OCH₂CH₂)ₙO—, depending upon whether or not the terminal oxygens have been displaced, e.g., during a synthetic transformation. A PEG can be capped with a suitable end group. At least 50% of the repeating subunits of a PEG can have the structure —CH₂CH₂—. A PEG can have any suitable molecular weight, structure, and/or geometry such as branched, linear, forked, or multifunctional.

[0077] A “physiologically cleavable” or “hydrolyzable” or “degradable” bond is a bond that reacts with water (i.e., is hydrolyzed) under physiological conditions. The tendency of a bond to hydrolyze in water will depend not only on the general type of linkage connecting two central atoms but also on the substituents attached to these central atoms. Suitable hydrolytically unstable or weak linkages include, for example, carboxylate ester, phosphate ester, anhydrides, acetals, ketals, acyloxyalkyl ether, imines, orthoesters, peptides, and oligonucleotides.

[0078] An “enzymatically degradable linkage” refers to a chemical linkage that can be degraded or cleaved by one or more enzymes.

[0079] A “hydrolytically stable” linkage or bond refers to a chemical bond, such as a covalent bond, that is substantially stable in water such that the chemical bond does not undergo hydrolysis under physiological conditions to any appreciable extent over an extended period of time. Examples of hydrolytically stable linkages include, but are not limited to, the following: carbon-carbon bonds (e.g., in aliphatic chains), ethers, amides, urethanes, and the like. Generally, a hydrolytically stable linkage is one that exhibits a rate of hydrolysis of less than about 1% to 2% per day under physiological conditions.

[0080] An “IL-2Rα ligand” refers to a peptide capable of binding to the IL-2Rα subunit of a mammalian IL-2 receptor, such as a human IL-2 receptor, with an IC₅₀ less than 100 μM.

[0081] An “IL-2Rβ ligand” refers to a peptide capable of binding to the IL-2Rβ subunit of a mammalian IL-2 receptor, such as a human IL-2 receptor, with an IC₅₀ less than 100 μM.

[0082] An “IL-2Rβ ligand” or an “IL-2Rβ ligand provided by the present disclosure” includes, for example, a peptide having an amino acid sequence of any one of SEQ ID NOS: 805-903, 911-930, 2575-2655, 2661-2891, 2900-2986, 2929-2941, 3100-3128, 3130-3151, 3160-3166, 3170-3186, and 3200-3207, a truncated amino acid sequence based on SEQ ID NOS: 805-903, 911-930, 2575-2655, 2661-2891, 2900-2986, 2929-2941, 3100-3128, 3130-3151, 3160-3166, 3170-3186, and 3200-3207, an amino acid sequence having SEQ ID NOS: 805-903, 911-930, 2575-2655, 2661-2891, 2900-2986, 2929-2941, 3100-3128, 3130-3151, 3160-3166, 3170-3186, and 3200-3207 and flanking amino acids, an amino acid sequence based on SEQ ID NOS: 805-903, 911-930, 2575-2655, 2661-2891, 2900-2986, 2929-2941, 3100-3128, 3130-3151, 3160-3166, 3170-3186, and 3200-3207 having one or more conservative or non-conservative amino acid substitutions, compounds incorporating one or more amino acid sequences having SEQ ID NOS: 805-903, 911-930, 2575-2655, 2661-2891, 2900-2986, 2929-2941, 3100-3128, 3130-3151, 3160-3166, 3170-3186, and 3200-3207, or a combination of any of the foregoing.

[0083] An “IL-2Rγc ligand” refers to a peptide capable of binding to the IL-2Rγc subunit of a mammalian IL-2 receptor, such as a human IL-2 receptor, with an IC₅₀ less than 100 μM.

[0084] An “IL-2Rγc ligand” or an “IL-2Rγc ligand provided by the present disclosure” includes, for example, a peptide having an amino acid sequence of any one of SEQ ID NOS: 944-1028, 1032-1060, and 1601-1613, a truncated amino acid sequence based on SEQ ID NOS: 944-1028, 1032-1060, and 1601-1613, an amino acid sequence having SEQ ID NOS: 944-1028, 1032-1060, and 1601-1613 and flanking amino acids, an amino acid sequence based on SEQ ID NOS: 944-1028, 1032-1060, and 1601-1613 having one or more conservative or non-conservative amino acid substitutions, compounds incorporating one or more amino acid sequences having SEQ ID NOS: 944-1028, 1032-1060, and 1601-1613, or a combination of any of the foregoing.

[0085] An “IL-2Rβγc ligand” or IL-2Rβγc ligand provided by the present disclosure” includes, for example, an at least one IL-2Rβ ligand provided by the present disclosure and at least one IL-2Rγc ligand provided by the present disclosure.

[0086] A ligand comprising an amino acid sequence having SEQ ID NO: refers to a ligand having the amino acid sequence identified by the SEQ ID NO:, a truncated amino acid sequence based on the SEQ ID NO:, an amino acid sequence having the SEQ ID NO: and flanking amino acids, an amino acid sequence based on the SEQ ID NO: having one or more conservative or non-conservative amino acid substitutions, compounds incorporating one or more amino acid sequences having SEQ ID NO:, or a combination of any of the foregoing.

[0087] The “hu-IL-2Rβ subunit” refers to the human (Homo sapiens) interleukin-2 receptor subunit β precursor NCBI Reference Sequence NP_000689.1.

[0088] The “hu-IL-2Rγc subunit” refers to the human (Homo sapiens) interleukin-2 receptor subunit γc precursor NCBI Reference Sequence NP_000197.1.

[0089] The “cyno-IL-2Rβ subunit” refers to the cynomolgus monkey interleukin-2 receptor subunit β precursor NCBI Reference Sequence NP 001244989.1.

[0090] The “cyno-IL-2Rγc subunit” refers to the cynomolgus monkey interleukin-2 receptor subunit α precursor NCBI Reference Sequence XP_005593949.

[0091] A recombinant “ligand fusion protein” refers to a protein made by recombinant DNA technology in which the translational reading frame of a ligand of a mammalian IL-2 receptor is fused to that of another protein, i.e., the IL-2R ligand fusion partner, to produce a single recombinant polypeptide. A ligand fusion protein can comprise an IL-2Rβ ligand and an IL-2Rγc ligand, an IL-2Rβγc ligand, and/or a tandem IL-2Rβγc ligand. A fusion partner can be the Fc domain of an IgG molecule where the IL-2Rβγc ligand is attached to the two C-termini of the Fc structure. A ligand fusion protein can include a peptidyl linker such as an amino acid sequence located between an IL-2R ligand and a fusion protein partner comprising a fusion protein, such that the peptidyl linker amino acid sequence is not derived from either the IL-2R ligand or the fusion protein partner. Peptidyl linkers can be incorporated into fusion proteins as spacers to promote proper protein folding and stability of the component protein moieties, to improve protein expression, and/or to enable better bioactivity of the two fusion partners. Peptidyl linkers can include, for example, a flexible peptide or a rigid peptide.

[0092] An “IL-2Rβγc ligand” refers to a compound consisting of or comprising one or more IL-2Rβ ligands and one or more IL-2Rγc ligands. The one or more IL-2Rβ ligands and one or more IL-2Rγc ligands can be bound to an IL-2Rβγc ligand linker. An IL-2Rβγc ligand can comprise a tandem IL-2Rβγc ligand comprising two or more IL-2Rβγc ligands, or it can comprise a single ligand that simultaneously binds to both the IL-2R□ subunit and the IL-2Rγc subunit. An IL-2Rβγc ligand is capable of binding to the IL-2Rβ subunit and to the IL-2Rγc subunit of IL-2R with an IC₅₀ less than 100 μM.

[0093] An “IL-2Rβγc ligand construct” refers to a compound comprising one or more IL-2Rβγc ligands bound to a construct partner. An IL-2Rβγc ligand construct also includes compounds in which one or more IL-2Rβ ligands and one or more IL-2Rγc ligands are bound to a construct partner.

[0094] An “IL-2Rβγc binding compound” refers to a compound capable of binding to both the IL-2Rβ and IL-2Rγc subunit and includes an IL-2Rβγc ligand, a tandem IL-2Rβγc ligand, an IL-2Rβγc ligand construct, and to a construct comprising an IL-2Rβ ligand and an IL-2Rγc ligand. An IL-2Rβγc binding compound can bind to both the IL-2Rβ subunit and the IL-2Rγc subunit with an IC₅₀, for example, of less than 100 μM such as less than 10 μM less than 1 μM, or less than 0.1 μM.

[0095] Bioisosteres are atoms or molecules that fit the broadest definition for isosteres. The concept of bioisosterism is based on the concept that single atom, groups, moieties, or whole molecules, which have chemical and physical similarities produce similar biological effects. A bioisostere of a parent compound can still be recognized and accepted by its appropriate target, but its functions will be altered as compared to the parent molecule. Parameters influenced by bioisosteric replacements include, for example, size, conformation, inductive and mesomeric effects, polarizability, capacity for electrostatic interactions, charge distribution, H-bond formation capacity, pKa (acidity), solubility, hydrophobicity, lipophilicity, hydrophilicity, polarity, potency, selectivity, reactivity, or chemical and metabolic stability, ADME (absorption, distribution, metabolism, and excretion). Although common in pharmaceuticals, carboxyl groups or carboxylic acid functional groups (—CO₂H) in a parent molecule may be replaced with a suitable surrogate or (bio)isostere to overcome chemical or biological shortcomings while retaining the desired attributes of the parent molecule bearing one or more carboxyl groups or carboxylic acid functional groups (—CO₂H). IL-2Rβγc ligands include bioisosteres of the IL-2Rβγc ligands provided by the present disclosure

[0096] “Isostere” or “isostere replacement” refers to any amino acid or other analog moiety having physiochemical and/or structural properties similar to a specified amino acid. An “isostere” or “suitable isostere” of an amino acid is another amino acid of the same class, wherein amino acids belong to the following classes based on the propensity of the side chain to be in contact with polar solvent like water: hydrophobic (low propensity to be in contact with water), polar or charged (energetically favorable contact with water). Examples of charged amino acid residues include lysine (+), arginine (+), aspartate (−) and glutamate (−). Examples of polar amino acids include serine, threonine, asparagine, glutamine, histidine and tyrosine. Illustrative hydrophobic amino acids include alanine, valine, leucine, isoleucine, proline, phenylalanine, tryptophan, cysteine and methionine. The amino acid glycine does not have a side chain and is difficult to assign to one of the above classes. However, glycine is often found at the surface of proteins, often within loops, providing high flexibility to these regions, and an isostere may have a similar feature. Proline has the opposite effect, providing rigidity to the protein structure by imposing certain torsion angles on the segment of the polypeptide chain. An isostere can be a derivative of an amino acid, e.g., a derivative having one or more modified side chains as compared to the reference amino acid. IL-2Rβγc ligands include isosteres of the IL-2Rβγc ligands provided by the present disclosure

[0097] “Cyclized” refers to a reaction in which one part of a peptide or polypeptide molecule becomes linked to another part of the peptide or polypeptide molecule to form a closed ring, such as by forming a disulfide bridge or other similar bond, e.g., a lactam bond. In particular embodiments, peptide monomer compounds or monomer subunits of peptide dimer compounds described herein are cyclized via an intramolecular bond between two amino acid residues present in the peptide monomer or monomer subunit. A peptide such as an IL-2Rβγc ligand can include cysteines that are bound together through disulfide bonds and thereby are cyclized IL-2Rβγc ligands.

[0098] “Patient” refers to a mammal, for example, a human.

[0099] “Peptide” refers to a polymer in which the monomers include amino acids joined together through amide bonds. A peptide can comprise, for example, less than 200 amino acids, less than 100 amino acids, less than 50 amino acids, less than 40 amino acids, less than 30 amino acids, or less than 20 amino acids. A peptide can comprise naturally occurring amino acids, non-naturally occurring amino acids, or a combination thereof.

[0100] In addition to peptides consisting only of naturally occurring amino acids, peptidomimetics or peptide analogs are also provided. Peptide mimetics that are structurally similar to therapeutically useful peptides may be used to produce an equivalent or enhanced therapeutic or prophylactic effect. Generally, peptidomimetics are structurally similar to a paradigm peptide, for example, a peptide that has a biological or pharmacological activity, such as a naturally-occurring receptor-binding peptide, but have one or more peptide linkages optionally replaced by a linkage such as —CH₂—NH—, —CH₂—S—, —CH₂—CH₂—, —CH═CH— (cis and trans), —COCH₂—, —CH(OH)CH₂—, and —CH₂SO—, by methods known in the art.

[0101] Substitution of one or more amino acids of a consensus sequence with a D-amino acid of the same type, such as D-lysine in place of L-lysine, may be used to generate more stable peptides. In addition, constrained peptides comprising a consensus sequence, or a substantially identical consensus sequence variation may be generated by methods known in the art; for example, by adding internal cysteine residues capable of forming intramolecular disulfide bridges which cyclize the peptide.

[0102] Synthetic or non-naturally occurring amino acids refer to amino acids that do not naturally occur in vivo but which, nevertheless, can be incorporated into the peptide ligands provided by the present disclosure. Suitable examples of synthetic amino acids include the D-α-amino acids of naturally occurring L-α-amino acid as well as non-naturally occurring D- and L-α-amino acids represented by the formula H₂NCHR⁵COOH where R⁵ is C₁₋₆ alkyl, C₃₋₈ cycloalkyl, C₃₋₈ heterocycloalkyl; an aromatic residue of from 6 to 10 carbon atoms optionally having from 1 to 3 substituents on the aromatic nucleus selected from hydroxyl, lower alkoxy, amino, and carboxyl; -alkylene-Y where alkylene is an alkylene group of from 1 to 7 carbon atoms and Y is selected from a hydroxyl, amino, cycloalkyl, and cycloalkenyl having from 3 to 7 carbon atoms; aryl of from 6 to 10 carbon atoms, such as from 1 to 3 substituents on the aromatic nucleus selected hydroxyl, lower alkoxy, amino and carboxyl; heterocyclic of from 3 to 7 carbon atoms and 1 to 2 heteroatoms selected from oxygen, sulfur, and nitrogen; —C(O)R² where R² is selected from hydrogen, hydroxy, lower alkyl, lower alkoxy, and —NR³R⁴ where each of R³ and R⁴ is independently selected from hydrogen and lower alkyl; —S(O)ₙR⁶ where n is 1 or 2 and R⁶ is C₁₋₆ alkyl, and with the proviso that R⁶ does not define a side chain of a naturally occurring amino acid.

[0103] Examples of other synthetic amino acids include amino acids in which the amino group is separated from the carboxyl group by more than one carbon atom such as β-alanine and γ-aminobutyric acid.

[0104] Examples of suitable synthetic amino acids include the D-amino acids of naturally occurring L-amino acids, L-1-naphthyl-alanine, L-2-naphthylalanine, L-cyclohexylalanine, L-2-amino isobutyric acid, the sulfoxide and sulfone derivatives of methionine, i.e., HOOC—(H₂NCH)CH₂CH₂—S(O)ₙR, where n and R are as defined above as well as the lower alkoxy derivative of methionine, i.e., HOOC—(H₂NCH)CH₂CH₂OR where R is as defined above.

[0105] “N-terminus” refers to the end of a peptide or polypeptide, such as an N-terminus of an IL-2Rβγc ligand, an IL-2Rβγc ligand construct, an IL-2Rβ ligand, or an IL-2Rγc ligand, that bears an amino group in contrast to the carboxyl end bearing a carboxylic acid group.

[0106] “C-terminus” refers to the end of a peptide or polypeptide, such as a C-terminus of an IL-2Rβγc ligand, an IL-2Rβγc ligand construct, an IL-2Rβ ligand or an IL-2Rγc ligand, that bears a carboxylic acid group in contrast to the amino terminus bearing an amino group. In certain synthetic peptides, the N-terminus does not bear an amino group and/or the C-terminus does not bear a carboxyl group. In such cases the nomenclature refers to the direction of the peptide backbone.

[0107] “Pharmaceutically acceptable” refers to approved or approvable by a regulatory agency of the Federal or a state government or listed in the U.S. Pharmacopoeia or other generally recognized pharmacopoeia for use in animals, and more particularly in humans.

[0108] “Pharmaceutically acceptable salt” refers to a salt of a compound, which possesses a desired pharmacological activity of the parent compound. Such salts include acid addition salts, formed with inorganic acids and one or more protonate-able functional groups such as primary, secondary, or tertiary amines within the parent compound. Examples of inorganic acids include hydrochloric acid, hydrobromic acid, sulfuric acid, nitric acid, and phosphoric acid. A salt can be formed with organic acids such as, for example, acetic acid, propionic acid, hexanoic acid, cyclopentanepropionic acid, glycolic acid, pyruvic acid, lactic acid, malonic acid, succinic acid, malic acid, maleic acid, fumaric acid, tartaric acid, citric acid, benzoic acid, 3-(4-hydroxybenzoyl) benzoic acid, cinnamic acid, mandelic acid, methanesulfonic acid, ethanesulfonic acid, 1,2-ethane-disulfonic acid, 2-hydroxyethanesulfonic acid, benzenesulfonic acid, 4-chlorobenzenesulfonic acid, 2-naphthalenesulfonic acid, 4-toluenesulfonic acid, camphorsulfonic acid, 4-methylbicyclo[2.2.2]-oct-2-ene-1-carboxylic acid, glucoheptonic acid, 3-phenylpropionic acid, trimethylacetic acid, tertiary butylacetic acid, lauryl sulfuric acid, gluconic acid, glutamic acid, hydroxynaphthoic acid, salicylic acid, stearic acid, or muconic acid. A salt can be formed when one or more acidic protons present in the parent compound are replaced by a metal ion, e.g., an alkali metal ion, an alkaline earth ion, or an aluminum ion, or combinations thereof; or coordinates with an organic base such as ethanolamine, diethanolamine, triethanolamine, or N-methylglucamine. A pharmaceutically acceptable salt can be a hydrochloride salt. A pharmaceutically acceptable salt can be a sodium salt. A compound can have two or more ionizable groups, and a pharmaceutically acceptable salt can comprise one or more counterions, such as a bi-salt, for example, a dihydrochloride salt.

[0109] “Pharmaceutically acceptable salt” refers to hydrates and other solvates, as well as salts in crystalline or non-crystalline form. Where a particular pharmaceutically acceptable salt is disclosed, it is understood that the particular salt (e.g., a hydrochloride salt) is an example of a salt, and that other salts may be formed using techniques known to one of skill in the art. Additionally, a pharmaceutically acceptable salt to the corresponding compound, free base and/or free acid, using techniques generally known in the art. See also: Stahl and Wermuth, C. G. (Editors), Handbook of Pharmaceutical Salts, Wiley-VCH, Weinheim, Germany, 2008.

[0110] “Pharmaceutically acceptable vehicle” refers to a pharmaceutically acceptable diluent, a pharmaceutically acceptable adjuvant, a pharmaceutically acceptable excipient, a pharmaceutically acceptable carrier, or a combination of any of the foregoing with which a compound provided by the present disclosure may be administered to a patient and which does not destroy the pharmacological activity thereof and which is non-toxic when administered in doses sufficient to provide a therapeutically effective amount of the compound.

[0111] “Solvate” refers to a molecular complex of a compound with one or more solvent molecules in a stoichiometric or non-stoichiometric amount. Such solvent molecules are those commonly used in the pharmaceutical arts, which are known to be innocuous to a patient, e.g., water, ethanol, and the like. A molecular complex of a compound or moiety of a compound and a solvent can be stabilized by non-covalent intra-molecular forces such as, for example, electrostatic forces, van der Waals forces, or hydrogen bonds. The term “hydrate” refers to a solvate in which the one or more solvent molecules is water.

[0112] “Pharmaceutical composition” refers to an IL-2Rβγc binding compound provided by the present disclosure such as IL-2Rβγc ligands or a pharmaceutically acceptable salt thereof and IL-2Rβγc ligand constructs or a pharmaceutically acceptable salt thereof and at least one pharmaceutically acceptable vehicle with which the IL-2Rβγc binding compound or a pharmaceutically acceptable salt thereof is administered to a patient.

[0113] “Preventing” or “prevention” refers to a reduction in risk of acquiring a disease or disorder such as, for example causing at least one of the clinical symptoms of the disease not to develop in a patient that may be exposed to or predisposed to the disease but does not yet experience or display symptoms of the disease. In some embodiments, “preventing” or “prevention” refers to reducing symptoms of the disease by taking the compound in a preventative fashion.

[0114] “Therapeutically effective amount” refers to the amount of a compound that, when administered to a patient for treating a disease, or at least one of the clinical symptoms of a disease, is sufficient to treat the disease or symptom thereof. A “therapeutically effective amount” may vary depending, for example, on the compound, the disease and/or symptoms of the disease, severity of the disease and/or symptoms of the disease or disorder, the age, weight, and/or health of the patient to be treated, and the judgment of a prescribing physician. An appropriate amount in any given instance may be ascertained by those skilled in the art or capable of determination by routine experimentation.

[0115] “Therapeutically effective dose” refers to a dose that provides effective treatment of a disease or disorder in a patient. A therapeutically effective dose may vary from compound to compound, and from patient to patient, and may depend upon factors such as the condition of the patient and the route of delivery. A therapeutically effective dose may be determined in accordance with routine pharmacological procedures known to those skilled in the art.

[0116] “Treating” or “treatment” of a disease refers to arresting or ameliorating a disease or at least one of the clinical symptoms of a disease or disorder, reducing the risk of acquiring a disease or at least one of the clinical symptoms of a disease, reducing the development of a disease or at least one of the clinical symptoms of the disease or reducing the risk of developing a disease or at least one of the clinical symptoms of a disease. “Treating” or “treatment” also refers to inhibiting the disease, either physically, (e.g., stabilization of a discernible symptom), physiologically, (e.g., stabilization of a physical parameter), or both, and to inhibiting at least one physical parameter or manifestation that may or may not be discernible to the patient. In certain embodiments, “treating” or “treatment” refers to delaying the onset of the disease or at least one or more symptoms thereof in a patient who may be exposed to or predisposed to a disease or disorder even though that patient does not yet experience or display symptoms of the disease.

[0117] “Tregs” or “Treg cells” refer to regulatory T-cells. Regulatory T-cells are a class of T-cells that suppress the activity of other immune cells and are defined using flow cytometry by the cell marker phenotypes CD4+/CD25+/FOXP3+, CD4+CD25+CD127lo, or CD4+/CD25+/FOXP3+/CD127lo. Because FOXP3 is an intracellular protein and requires cell fixation and permeabilization for staining, the cell surface phenotype CD4+CD25+CD127lo− can be used for defining live Tregs. Tregs also include various Treg subclasses, such as tTregs (thymus-derived) and pTregs (peripherally derived, differentiated from naive T-cells in the periphery). Tregs play a critical role in the induction and maintenance of peripheral self-tolerance to antigens, including those expressed by tumors. “CD4+ T cells” are a type of lymphocyte that functions to coordinate the immune response by stimulating other immune cells such as macrophages, B lymphocytes (B cells), CD8 lymphocytes (CD8 cells) to fight infection. CD4+ T cells recognize peptides presented on MHC Class II molecules, which are found on antigen-presenting cells.

[0118] As with CD4+ T cells, “CD8+(cytotoxic) T-cells” are generated in the thymus and express the T-cell receptor. Cytotoxic T-cells express a dimeric co-receptor, CD8, which typically comprises one CD8a and one CD8I3 chain. CD8+ T-cells recognize peptides presented by MHC Class 1 molecules found on most nucleated cells. The CD8 heterodimer binds to a conservative portion of MHC Class 1 during T-cell/antigen presenting cell interactions. CD8+ T-cells (cytotoxic T lymphocytes, or CTLs) are important for immune defense against intracellular pathogens including viruses and bacteria, and for tumor surveillance.

[0119] “NK (natural killer) cells” are lymphocytes of the innate immune system and are classified as group I innate lymphocytes (ILCs). NK cells respond to a wide variety of pathological challenges including by killing virally infected cells and detecting and controlling early signs of cancer.

[0120] “Functional activation of cells” refers to an IL-2-mediated response in cells such as, for example, T-cells and NK cells. Assays for functional activation of cells include stimulation of pSTAT5, cell proliferation or markers of proliferation (such as Ki67), change in immune cell type ratios, and stimulation of the levels of effector proteins.

[0121] “Effector cells” refers to a population of lymphocytes that mediate the helper (CD4+ cells) and cytotoxic (CD8+ and NK cells) effects. Effector cells include effector T-cells such as CD4+ helper T-cells, CD8+ cytotoxic T-cells, NK cells, lymphokine-activated killer (LAK) cells and macrophages/monocytes.

[0122] “Naïve T-cells” refer to T-cells that have differentiated in bone marrow and undergone the positive and negative processes of central selection in the thymus. Naïve T-cells include naïve forms of helper T cells, CD4+ T-cells) and naïve cytotoxic T-cells (CD8+ T-cells). Naive T-cells are commonly characterized by the surface expression of L-selectin (CD62L) and C—C chemokine receptor type 7 (CCR7) and the expression of IL-7R (CD127) and the absence of the activation markers CD25, CD44, and CD69.

[0123] “Memory T-cells” are a subset of T lymphocytes including both CD4+ and CD8+. The primary function of memory T-cells is rapid augmented immune response after reactivation of those cells by reintroduction of a relevant antigen or pathogen into the body.

[0124] “Antigen binding moiety” refers to a polypeptide molecule that specifically binds to an antigenic determinant. An antigen binding moiety can direct, for example, the entity to which it is attached, such as a cytokine or a second antigen binding moiety, to a target site, for example, to a specific type of tumor cell or tumor stroma bearing the antigenic determinant. Antigen binding moieties include antibodies and fragments thereof. Examples of antigen binding moieties include an antigen binding domain of an antibody comprising an antibody heavy chain variable region and an antibody light chain variable region. An antigen binding moiety can include antibody constant regions. Useful heavy chain constant regions can include any of the five isotypes: α, δ, ε, γ, or μ. Useful light chain constant regions can include any of the two isotypes K and A.

[0125] “Polypeptide” refers to a molecule composed of monomers (amino acids) linearly linked by amide bonds (also known as peptide bonds). The term “polypeptide” refers to any chain of two or more amino acids and does not refer to a specific length of the product. Thus, peptides, dipeptides, tripeptides, oligopeptides, “protein,” “amino acid chain,” or any other term used to refer to a chain of two or more amino acids, are included within the definition of “polypeptide,” and the term “polypeptide” may be used instead of, or interchangeably with any of these terms. The term “polypeptide” is also intended to refer to the products of post-expression modifications of the polypeptide including, for example, glycosylation, acetylation, phosphorylation, amidation, derivatization by known protecting/blocking groups, proteolytic cleavage, and/or modification by non-naturally occurring amino acids. A polypeptide may be derived from a natural biological source or produced by recombinant technology but is not necessarily translated from a designated nucleic acid sequence. A polypeptide may be generated in any manner, including by recombinant methods or by chemical synthesis. A polypeptide may have, for example, more than 100 amino acids, more than 200 amino acids, more than 500 amino acids, more than 1,000 amino acids, or more than 2,000 amino acids. Polypeptides may have a defined three-dimensional structure, although they do not necessarily have such structure. Polypeptides with a defined three-dimensional structure are referred to as folded, and polypeptides which do not possess a defined three-dimensional structure, but rather can adopt a large number of different conformations and are referred to as unfolded.

[0126] “Polynucleotide” refers to an isolated nucleic acid molecule or construct, e.g., messenger RNA (mRNA), virally derived RNA, or plasmid DNA (pDNA). A polynucleotide may comprise a conventional phosphodiester bond or a non-conventional bond, such as an amide bond, such as found in peptide nucleic acids (PNA).

[0127] “Nucleic acid molecule” refers to any one or more nucleic acid segments, such as DNA or RNA fragments, present in a polynucleotide.

[0128] “Vector” or “expression vector” is synonymous with “expression construct” and refers to a DNA molecule that is used to introduce and direct the expression of a specific gene to which it is operably associated in a target cell. A vector can be a self-replicating nucleic acid structure as well as a vector incorporated into the genome of a host cell into which it has been introduced. An expression vector can comprise an expression cassette. Expression vectors allow transcription of large amounts of stable mRNA. Once an expression vector is inside the target cell, the ribonucleic acid molecule or protein that is encoded by the gene is produced by the cellular transcription and/or translation machinery. An expression vector can comprise an expression cassette that comprises polynucleotide sequences that encode an IL-2Rβγc binding compound provided by the present disclosure such as an IL-2Rβγc ligand or IL-2Rβγc ligand construct provided by the present disclosure.

[0129] “Host cell,” “host cell line,” and “host cell culture” refer to cells into which are exogenous nucleic acid has been introduced, including the progeny of such cells. Host cells include, for example, “transformants” and “transformed cells,” which include the primary transformed cell and progeny derived from the primary transformed cell without regard to the number of passages.

[0130] “Antibody” in the broadest sense encompasses various antibody structures including, for example, monoclonal antibodies, polyclonal antibodies, multi-specific antibodies such as bispecific antibodies, and antibody fragments that exhibit a desired antigen binding activity. The term “antibody” can be abbreviated as “ab” such as in the expression Fab or anti-phage Ab.

[0131] “Full-length antibody,” “intact antibody,” and “whole antibody” refer to an antibody having a structure substantially similar to a native antibody structure or having heavy chains that contain both Fab and an Fe region.

[0132] “Antibody fragment” refers to a molecule other than an intact antibody that comprises a portion of an intact antibody that binds the antigen to which the intact antibody binds. Examples of antibody fragments include Fv, Fab, Fab′, Fab′-SH, F(ab′)2, diabodies, linear antibodies, single-chain antibody molecules such as scFv, and multi-specific antibodies formed from antibody fragments. Diabodies are antibody fragments with two antigen binding sites that may be bivalent or bispecific. Antibody fragments can be made by various techniques, including but not limited to proteolytic digestion of an intact antibody as well as production by recombinant host cells such as E. coli or phage.

[0133] “Fab” or “Fab region” refers to a polypeptide that comprises the VH, CHI, VL, and CL immunoglobulin domains, generally on two different polypeptide chains such as VH-CHl on one chain and VL-CL on the other. Fab may refer to this region in isolation, or this region in the context of a bispecific antibody. In the context of a Fab, the Fab comprises an Fv region in addition to the CHI and CL domains.

[0134] “Fv” or “Fv fragment” or “Fv region” refers to a polypeptide that comprises the VL and VH domains of an ABD. Fv regions can be formatted as both Fabs (generally two different polypeptides that also include the constant regions) and scFvs, where the vi and vh domains are combined (generally with a linker as discussed) to form an scFv.

[0135] “Single chain Fv” or “scFv” refers to a variable heavy domain covalently attached to a variable light domain, generally using a scFv linker as discussed herein, to form a scFv or scFv domain. A scFv domain can be in either orientation with the VL domain at the N- or C-terminus of the polypeptide, and conversely for the VH domain.

[0136] “Effector function” refers to a biochemical event that results from the interaction of an antibody Fc region with an Fc receptor or ligand. Effector functions include, for example, antibody-dependent cellular toxicity (ADCC), antibody-dependent cellular phagocytosis (ADCP), and complement-dependent cytotoxicity (CDC).

[0137] “Fc” or “Fc region” or “Fc chain” refers to polypeptide comprising the constant region of an antibody, in some instances, excluding all or a portion of the first constant region immunoglobulin domain (e.g., CHI) or a portion thereof, and in some cases, further excluding all or a portion of the hinge. Thus, an Fc can refer to the last two constant region immunoglobulin domains (e.g., CH₂ and CH₃) of lgA, IgD, and IgG, the last three constant region immunoglobulin domains of IgE and IgM, and optionally, all or a portion of the flexible hinge N-terminal to these domains. For IgA and IgM, Fc may include the J chain. For IgG, the Fc chain comprises immunoglobulin domains CH₂ and CH₃ (Cy2 and Cy3), and optionally all or a portion of the hinge region between CHI (Cy1) and CH₂ (Cy2). Although the boundaries of the Fc region may vary, the human IgG heavy chain Fc region is usually defined to include residues E216, C226, or A231 to its carboxyl-terminus, wherein the numbering is according to the EU index as in Kabat. An amino acid modification can be made to the Fc region, for example to alter binding to one or more FcyR or to the FcRn. In EU numbering for human IgG1, the CH2-CH3 domain comprises amino acids 231 to 447, and the hinge is 216 to 230. Thus, the definition of Fc chain includes both amino acids 231-447 (CH2-CH3) or 216-447 (hinge-CH2-CH3), or fragments thereof. An Fc fragment can contain fewer amino acids from either or both of the N- and C-termini that retains the ability to form a dimer with another Fc chain or Fc fragment as can be detected using standard methods, generally based on size (e.g., non-denaturing chromatography, size exclusion chromatography, etc.). Human IgG Fc chains are of particular use, and can be the Fc chain from human IgG1, IgG2 or IgG4.

[0138] “Heavy constant region” refers to the CH1-hinge-CH2-CH3 portion of an antibody or fragments thereof, excluding the variable heavy domain; in EU numbering of human IgG1, such as amino acids 118-447.

[0139] “Heavy chain constant region fragment” refers to a heavy chain constant region that contains fewer amino acids from either or both of the N- and C-termini that retains the ability to form a dimer with another heavy chain constant region.

[0140] “Immunoglobulin” refers to a protein having the structure of a naturally occurring antibody. For example, immunoglobulins of the IgG class are heterotetrameric glycoproteins of about 150,000 Da, composed of two light chains and two heavy chains that are bonded together through disulfide bonds. From N- to C-terminus, each heavy chain has a variable region (VH), also called a variable heavy domain or a heavy chain variable domain, followed by three constant domains (CHI, CH2, and CH3), also called a heavy chain constant region. Similarly, from N- to C-terminus, each light chain has a variable region (VL), also called a variable light domain or a light chain variable domain, followed by a constant light (CL) domain, also called a light chain constant region. The heavy chain of an immunoglobulin may be assigned to one of five classes, called α (IgA), Ii (IgD), E (IgE), y (IgG), or μ (IgM), some of which may be further divided into subclasses, e.g., γ1 (IgG1), γ2 (IgG2), γ3 (IgG3), γ4(gG4), α1 (IgA1) and α2 (IgA2). The light chain of an immunoglobulin may be assigned to one of two types, kappa (κ) or lambda (L), based on the amino acid sequence of its constant domain. An immunoglobulin essentially consists of two Fab molecules and an Fc chain, linked via the immunoglobulin hinge region.

[0141] “Immunoconjugate” refers to a polypeptide molecule that includes at least one IL-2Rβγc ligand and at least one antigen binding moiety. An immunoconjugate can comprise at least one IL-2Rβγc ligand, and at least two antigen binding moieties. An immunoconjugate can comprise at least one IL-2Rβγc ligand and two antigen binding moieties joined by one or more linker sequences. An antigen binding moiety can be joined to the IL-2Rβγc ligand by a variety of interactions and in a variety of configurations. For example, an IL-2Rβγc ligand can be bound to an antigen binding moiety through a linker.

[0142] “Linker” refers to a moiety that binds one compound to another compound. Linkers can include IL-2Rβγc ligand linkers, tandem IL-2Rβγc ligand linkers, and IL-2Rβγc ligand construct linkers. A linker can be a synthetic linker. A linker can be an amino acid linker. For example, linkers provided by the present disclosure can facilitate the ability of an IL-2Rβγc ligand to interact with IL-2R, to bind to IL-2R with low IC₅₀, and/or to activate IL-2R. A linker can comprise a peptide or a non-peptide. Non-peptide linkers include those containing, for example, a triazole moiety derived from a Cu(I)-catalyzed reaction of alkyne and azide functionalities. An IL-2Rβγc ligand linker refers to a moiety that binds at least one IL-2R ligand such as an IL-2Rβ ligand and/or an IL-2Rγc ligand to another IL-2R ligand. A linker can bind to another IL-2R ligand which can be the same IL-2R ligand or a different IL-2R ligand. A linker can also bind to one or more additional moieties that provide a desired physiological function. A linker can be divalent or multivalent. A linker can be hydrolytically stable or may include a physiologically hydrolyzable or enzymatically degradable or cleavable linkage. A linker can bind IL-2R ligands to form dimers, trimers, or higher order multi-ligand peptides (heteromers) and compounds.

[0143] A “flexible linker” refers to a peptidyl linker comprising flexible amino acids such as glycine and serine. A flexible linker can comprise, for example, from 1 to 100 amino acids such as from 1 to 50, from 1 to 40, from 1 to 30, from 1 to 20, from 1 to 10, or from 1 to 5 amino acids, where each amino acid is independently selected from glycine and serine. Examples of flexible linkers include (G)ₙ (SEQ ID NO: 9380), (GS)ₙ (SEQ ID NO: 9381), (GGS)ₙ (SEQ ID NO: 9382), (GGGS)ₙ (SEQ ID NO: 9383), or (GGGGS)ₙ (SEQ ID NO: 9384) where n can be an integer from 1 to 20; (G)ₙ (SEQ ID NO: 9385), (GS)ₙ (SEQ ID NO: 9386), (GGS)ₙ (SEQ ID NO: 9387), (GGGS)ₙ (SEQ ID NO: 9388), or (GGGGS)ₙ (SEQ ID NO: 9389) where n can be an integer from 1 to 10; or (G)ₙ (SEQ ID NO: 9390), (GS)ₙ (SEQ ID NO: 9391), (GGS)ₙ (SEQ ID NO: 9392), (GGGS)ₙ (SEQ ID NO: 9393), or (GGGGS)ₙ (SEQ ID NO: 9394) where n can be an integer from 1 to 5. (A flexible linker can have the amino acid sequence, for example, (GGGGS) (SEQ ID NO: 9395), (GGGGS)2 (SEQ ID NO: 9396), (GGGGS)3 (SEQ ID NO: 9397), (GGGGS)4 (SEQ ID NO: 9398), (GG) (SEQ ID NO: 9399), (GGG) (SEQ ID NO: 9400), (GGGGG) (SEQ ID NO: 9401), (GGS) (SEQ ID NO: 9402), (GGGS) (SEQ ID NO: 9403), (GGGGSGG) (SEQ ID NO: 9404), (GGS)2 (SEQ ID NO: 9405), (G)5 (SEQ ID NO: 9406), or (GS)10 (SEQ ID NO: 9407).

[0144] A “rigid linker” refers to a peptidyl linker that is proline rich and can include other amino acids such as alanine, lysine, and/or glutamic acid. A rigid linker can comprise, for example, from 1 to 100 amino acids such as from 1 to 50, from 1 to 40, from 1 to 30, from 1 to 20, from 1 to 10, or from 1 to 5 amino acids, where each amino acid is independently selected from proline, alanine, lysine, and glutamic acid. A rigid linker can comprise, for example, from 1 to 100 amino acids such as from 1 to 50, from 1 to 40, from 1 to 30, from 1 to 20, from 1 to 10, or from 1 to 5 amino acids, where each amino acid is independently selected from proline and alanine. For example, a rigid linker can have the sequence (P). (SEQ ID NO: 9419) or (PA)ₙ (SEQ ID NO: 9418) where n is an integer from 1 to 50.

[0145] A rigid linker can have the sequence (P)ₙ (SEQ ID NO: 9420) or (PA)ₙ (SEQ ID NO: 9421), where n is an integer from 1 to 20. A rigid linker can have the sequence (P)ₙ (SEQ ID NO: 9422) or (PA)ₙ (SEQ ID NO: 9423), where n is an integer from 1 to 10. A rigid linker can have the sequence (P)ₙ (SEQ ID NO: 9424) or (PA)ₙ (SEQ ID NO: 9425), where n is an integer from 1 to 5. A rigid linker can have the sequence (PA)₅ (SEQ ID NO: 9426), (PA)₇ (SEQ ID NO: 9427), (PA)₁₀ (SEQ ID NO: 9428).

[0146] Examples of rigid linkers include α-helix forming linkers and proline rich linkers. Examples of suitable α-helix forming linkers include peptides having the amino acid sequence (EAAAK)n (SEQ ID NO: 1440) where n can be, for example, an integer from 1 to 10, such as an integer from 1 to 5, or an integer from 2 to 5. Examples of suitable proline rich linkers include peptides having the amino acid sequence (PX)n where n is an integer, for example, from 1 to 20 (SEQ ID NO: 1441), such as from 1 to 15 (SEQ ID NO: 1442), from 1 to 10 (SEQ ID NO: 1443), from 5 to 15 (SEQ ID NO: 1444), or from 5 to 10 (SEQ ID NO: 1445), and each X can be independently selected from Ala, Lys, and Glu. Examples of suitable proline rich linkers include peptides having the amino acid sequence (XP)n where n is an integer, for example, from 1 to 20 (SEQ ID NO: 1446), such as from 1 to 15 (SEQ ID NO: 1447), from 1 to 10 (SEQ ID NO: 1448), from 5 to 15 (SEQ ID NO: 1449), or from 5 to 10 (SEQ ID NO: 1450), and each X can be independently selected from Ala, Lys, and Glu. In a proline rich linker of SEQ ID NOS: 1440-1451, n can be 1, 2, 3, 4, 5, 6, 7, 8, 9, 10, 11 or 12. In a proline rich linker of SEQ ID NOS: 1440-1451, each X can be Ala, each X can be Lys, or each X can be Glu. In a proline rich linker of SEQ ID NOS: 1440-1451, each X can independently be selected from be Ala, Lys, and Glu. A rigid linker can have the amino acid sequence (PA)n, where n is an integer from 1 to 20 (SEQ ID NO: 9421), such as from 1 to 15 (SEQ ID NO: 1452), from 1 to 10 (SEQ ID NO: 9423), from 5 to 15 (SEQ ID NO: 1453), or from 5 to 10 (SEQ ID NO: 1454). A rigid linker can be selected from (PA)₄ (SEQ ID NO: 9442), (PA)₅ (SEQ ID NO: 9426), (PA)₆ (SEQ ID NO: 9443), (PA)₇ (SEQ ID NO: 9427), (PA)₈ (SEQ ID NO: 9444), (PA)₉ (SEQ ID NO: 9445), (PA)₁₀ (SEQ ID NO: 9428), (PA)₁₁ (SEQ ID NO: 9446), and (PA)₁₂ (SEQ ID NO: 9447). A rigid linker can be, for example, (PA)nG where n is an integer from 1 to 20 (SEQ ID NO: 1460), or from 5 to 15 (SEQ ID NO: 1461), such as (PA)6G (SEQ ID NO: 1462), (PA)7G (SEQ ID NO: 1463), (PA)8G (SEQ ID NO: 1464), (PA)9G (SEQ ID NO: 1465), (PA)10G (SEQ ID NO: 1466), or (PA)10G (SEQ ID NO: 1467). A rigid linker can have an amino acid sequence having from 2 to 50 amino acids and where greater than 10% of the amino acids are selected from Pro, Arg, Phe, Thre, Glu, and. Gln, A rigid linker can have an amino acid sequence having, for example, from 2 to 50 amino acids, from 5 to 40, from 10 to 30, or from 10 to 25 amino acids, and where from 10% to 90%, from 15% to 80%, from 20% to 70%, or from 30% to 60% of the amino acids are independently selected from Pro, Arg, Phe, Thr, Glu, and. Gln.

[0147] “Protein” refers to at least two covalently attached amino acids, which includes proteins, polypeptides, oligopeptides and peptides. In addition, polypeptides that make up the antibodies may include synthetic derivatization of one or more side chains or termini, glycosylation, PEGylation, circular permutation, cyclization, linkers to other molecules, fusion to proteins or protein domains, and addition of peptide tags or labels. When a biologically functional molecule comprises two or more proteins, each protein may be referred to as a “monomer” or as a “subunit” or as a “domain”; and the biologically functional molecule may be referred to as a “complex”.

[0148] “Binding affinity” refers to the strength of the binding interaction between a single biomolecule and its ligand/binding partner. Binding affinity is expressed as the IC₅₀. For example, binding affinity of an IL-2Rβγc binding compound refers to the IC₅₀ as determined using, for example, a method described in the examples.

[0149] “Amino acid sequence similarity” refers to an amino acid sequence in which one or more amino acids of the amino has been replaced with a chemically similar amino acid. Examples of chemically similar amino acids include (a) amino acids having a small hydrophobic side chain such as alanine (A), glycine (G), proline (P), serine (S), or threonine (T); (b) amino acids having a hydroxyl-containing side chain such as serine (S), threonine (T), or tyrosine (Y); (c) amino acids having an acidic side chain such as aspartate (D) or glutamate (E); (d) amino acids having a polar-neutral side chain such as histidine (H), asparagine (N), glutamine (Q), serine (S), threonine (T), or tyrosine (Y); (e) amino acids having a basic side chain such as arginine (R), lysine (K), or histidine (H); (f) amino acids having a large hydrophobic side chain such as isoleucine (I), leucine (L), methionine (M), valine (V), phenylalanine (F), tyrosine (Y), or tryptophan (W); and (g) amino acids having an aromatic side chain comprising phenylalanine (F), histidine (H), tryptophan (W), or tyrosine (Y). A chemically similar amino acid can comprise a naturally occurring amino acid or a non-natural amino acid.

[0150] “Percent (%) sequence similarity” is determined by comparing the number of amino acids that are the same in a subject ligand and a reference ligand. A ligand provided by the present disclosure can comprise, for example, greater than 70%, greater than 80%, or greater than 90% sequence similarity to a reference ligand. For example, based on a reference ligand having SEQ ID NO: 9001, ligands having SEQ ID NOS: 9002-9007, have either 1, 2, 3, 4, or 5 amino acid in which an amino acid of the reference ligand has been substituted or replaced with the amino acid, alanine. Ligands having SEQ ID NOS: 9002-9007 are characterized by a 95%, 90%, 85%, 80%, 75%, or 70% sequence similarity, respectively, to the reference ligand.

SEQ ID NO: 9001
Y P C W L A R V G E L C D L D S G D V H
SEQ ID NO: 9002
A P C W L A R V G E L C D L D S G D V H
SEQ ID NO: 9003
A P C A L A R V G E L C D L D S G D V H
SEQ ID NO: 9004
A P C A L A A V G E L C D L D S G D V H
SEQ ID NO: 9005
A P C A L A A V G A L C D L D S G D V H
SEQ ID NO: 9006
A P C A L A A V G A L C D L A S G D V H
SEQ ID NO: 9007
A P C A L A A V G A L C D L A A G D V H

[0151] For example, an IL-2Rβγc binding compound provided by the present disclosure such as an IL-2Rβγc ligand or can have an amino acid sequence in which, for example, from 1 to 10 amino acids or from 1 to 5 amino acids of a reference amino acid sequence is substituted with another amino acid.

[0152] For example, a binding compound derived from a reference binding compound can have from 1 to 5 amino acid substitutions, from 1 to 4, from 1 to 3, or from 1 to 2 amino acid substitutions. For example, a binding compound derived from a reference binding compound can have 1 amino acid substitution, 2 amino acid substitutions, 3 amino acid substitutions, 4 amino acid substitutions, or 5 amino acid substitutions.

[0153] An amino acid substitution can be independent of other amino acid substitutions.

[0154] Each amino acid substitution can independently be a conservative amino acid substitution or a non-conservative amino acid substitution.

[0155] For example, a reference ligand can have the amino acid sequence of SEQ ID NO: 9011. Ligands having SEQ ID NOS: 9012-9016 represent substituted ligands in which the reference ligand having SEQ ID NO: 9011 has been substituted with from 1 to 5 conservative amino acid substitutions, respectively.

SEQ ID NO: 9011
Y W C W M A Q V G E L C D L
SEQ ID NO: 9012
Y H C W M A Q V G E L C D L
SEQ ID NO: 9013
Y H C W M G Q V G E L C D L
SEQ ID NO: 9014
Y H C W M G Q M G E L C D L
SEQ ID NO: 9015
Y H C W M G Q M G E L C E L
SEQ ID NO: 9016
Y H C W M G Q M G E L C E M

[0156] An IL-2Rβγc binding compound such as an IL-2Rβγc ligand construct provided by the present disclosure can have, for example, greater than 80%, greater than 85%, greater than 90%, greater than 95%, greater than 96%, greater than 98%, or greater than 99% sequence similarity to an IL-2Rβγc binding compound such as an IL-2Rβγc ligand construct identified by a specific SEQ ID NO: provided by the present disclosure.

[0157] A ligand provided by the present disclosure such as an IL-2Rβ ligand, an IL-2Rγc ligand, and an IL-2Rβγc ligand can comprise a truncated ligand. A “truncated ligand” refers to a ligand in which, for example, from 1 to 10 or from 1 to 5 amino acids have independently been removed from the N-terminus, the C-terminus, or from both the N-terminus and the C-terminus of the corresponding reference ligand. A truncated ligand derived from the corresponding reference ligand can independently have, for example from 1 to 5 amino acids, such as from 1 to 4 amino acids, from 1 to 3 amino acids, or from 1 to 2 amino acids independently removed from the N-terminus, the C-terminus, or from both the N-terminus and the C-terminus of the reference ligand. A truncated ligand derived from the corresponding ligand can independently have, for example, 1 amino acid, 2 amino acids, 3 amino acids, 4 amino acids, or 5 amino acids removed from the N-terminus, the C-terminus, or from both the N-terminus and the C-terminus of the reference ligand.

[0158] For example, a reference ligand can have the amino acid sequence of SEQ ID NO: 9021. Examples of truncated ligands derived from the reference ligand having SEQ ID NO: 9021 include truncated ligands having an amino acid sequence of SEQ ID NOS: 9022-9029.

SEQ ID NO: 9021
M G F Y P C W T A Q L G E L C D L S V D
SEQ ID NO: 9022
G F Y P C W T A Q L G E L C D L S V D
SEQ ID NO: 9023
F Y P C W T A Q L G E L C D L S V D
SEQ ID NO: 9024
Y P C W T A Q L G E L C D L S V D
SEQ ID NO: 9025
M G F Y P C W T A Q L G E L C D L S V
SEQ ID NO: 9026
M G F Y P C W T A Q L G E L C D L S
SEQ ID NO: 9027
M G F Y P C W T A Q L G E L C D L
SEQ ID NO: 9028
G F Y P C W T A Q L G E L C D L S V
SEQ ID NO: 9029
F Y P C W T A Q L G E L C D L

[0159] The truncated ligands of SEQ ID NOS: 9022-9024 have from 1 to 3 amino acids removed from the N-terminus of the reference ligand, respectively; truncated binding compounds ligands having SEQ ID NOS: 9025 to 9027 have from 1 to 3 amino acids removed from the C-terminus of the reference ligand, respectively; and truncated ligands having SEQ ID NOS: 9028 and 9029 have amino acids removed from both the N-terminus and from the C-terminus of the reference ligand.

[0160] As another example, a reference ligand can comprise an amino acid sequence of Formula (A):

(A)
-X¹-X²-C-X³-X⁴-X⁵-X⁶-X⁷-X⁸-X⁹-X¹⁰-C-X¹¹-X¹²-

where each —X— independently represents an amino acid. Amino acid sequences of Formula (A1)-(A5) represent examples of truncated ligands derived from the reference ligand comprising the amino acid sequence of Formula (A):

(A1)
-X²-C-X³-X⁴-X⁵-X⁶-X⁷-X⁸-X⁹-X¹⁰-C-X¹¹-X¹²-
(A2)
-C-X³-X⁴-X⁵-X⁶-X⁷-X⁸-X⁹-X¹⁰-C-X¹¹-X¹²-
(A3)
-C-X³-X⁴-X⁵-X⁶-X⁷-X⁸-X⁹-X¹⁰-C-
(A4)
-X³-X⁴-X⁵-X⁶-X⁷-X⁸-X⁹-X¹⁰-C-X¹¹-
(A5)
-X³-X⁴-X⁵-X⁶-X⁷-X⁸-X⁹-X¹⁰-

[0161] A ligand provided by the present disclosure can comprise, for example, an amino acid sequence in which from 1 to 3 flanking amino acids such as glycines are independently bonded to the N-terminus, to the C-terminus, or to both the N-terminus and to the C-terminus of a reference ligand.

[0162] For example, a reference ligand can have SEQ ID NO: 9031. Ligands having SEQ ID NOS: 9032-9034 have from 1 to 3 glycines bonded to the N-terminus of the reference ligand, respectively; ligands having SEQ ID NOS: 9035-9037 have from 1 to 3 glycines bonded to the C-terminus of the reference ligand, respectively; and ligands having SEQ ID NOS: 9038 and 9039 have 1 or 2 glycines bonded to both the N-terminus and to the C-terminus of the reference ligand.

SEQ ID NO: 9031
K Y C G F A Q L G E L C V L
SEQ ID NO: 9032
G K Y C G F A Q L G E L C V L
SEQ ID NO: 9033
G G K Y C G F A Q L G E L C V L
SEQ ID NO: 9034
G G G K Y C G F A Q L G E L C V L
SEQ ID NO: 9035
K Y C G F A Q L G E L C V L G
SEQ ID NO: 9036
K Y C G F A Q L G E L C V L G G
SEQ ID NO: 9037
K Y C G F A Q L G E L C V L G G G
SEQ ID NO: 9038
G K Y C G F A Q L G E L C V L G
SEQ ID NO: 9039
G G K Y C G F A Q L G E L C V L G

[0163] A ligand provided by the present disclosure can comprise, for example, one or more flanking amino acids such as, for example, flanking glycine groups on the N-terminus and/or the C-terminus of the respective ligand. For example, a ligand can comprise one or more flanking amino acids having an amino acid sequence of any one of SEQ ID NOS: 9380-9407 and 9419-9428.

[0164] “IL-2Rβγc binding compound” refers to an IL-2Rβγc ligand provided by the present disclosure, a tandem IL-2Rβγc ligand provided by the present disclosure, an IL-2Rβγc ligand construct provided by the present disclosure, and a construct comprising at least one IL-2Rβ ligand and at least one IL-2Rγc ligand provided by the present disclosure. An IL-2Rβ binding compound can bind to both the IL-2Rβ subunit and to the IL-2Rγc subunit with an IC₅₀, for example, less than 100 μM, less than 10 μM, less than 1 μM, less than 0.1 μM, or less than 0.01 μM.

[0165] IL-2R, the IL-2Rβ subunit, and the IL-2Rγc subunit refer to mammalian IL-2R, the IL-2Rβ subunit, and the IL-2Rγc subunit, respectively, such as human IL-2R, the human IL-2Rβ subunit, and the human IL-2Rγc subunit, respectively.

[0166] The expression “at least one” refers to “one or more.” For example, the expression “at least one” can refer to from 1 to 10, from 1 to 8, from 1 to 6, from 1 to 5, from 1 to 4, from 1 to 3, or from 1 to 2. For example, the expression “at least one” can refer to 1, 2, 3, 4, 5, 6, 7, 8, 9, or 10.

[0167] Reference is now made in detail to certain embodiments of compounds, compositions, and methods. The disclosed embodiments are not intended to be limiting of the claims. To the contrary, the claims are intended to cover all alternatives, modifications, and equivalents.

[0168] Interleukin-2 (IL-2) plays a crucial role in regulating immune responses and maintaining peripheral self-tolerance by having both immuno-stimulatory and immuno-regulatory functions. IL-2 acts primarily as a T-cell growth factor and is essential for the proliferation and survival of T-cells as well as for the generation of effector and memory T-cells. IL-2 is a four α-helical bundle cytokine that belongs to a family of structurally related cytokines that includes IL-4, IL-7, IL-9, IL-15, and IL-21. IL-2 is produced by activated CD4+ T-cells in response to antigen stimulation and can also be produced by CD8+ T-cells and innate immune cells such as activated dendritic cells (DCs) and natural killer (NK) cells.

[0169] IL-2 binds to various forms of the IL-2 receptor (IL-2R), notably the monomeric, dimeric, and trimeric forms. Monomeric IL-2R consists of the membrane-associated IL-2Rα (CD25) chain, which also exists in a soluble form; however, IL-2Rα is not capable of inducing signaling events. The trimeric IL-2R consists of IL-2Rα, IL-2Rβ (CD122), and IL-2Rγc, also known as the common γ-chain (γc) or CD132 and is shared by all members of the IL-2 cytokine family. Dimeric IL-2R comprises the IL-2Rγc and IL-2Rβ subunits. In contrast to monomeric IL-2R, activation of both dimeric IL-2R. and trimeric IL-2R leads to a downstream signaling cascade upon IL-2 binding. IL-2 binds with high affinity to trimeric IL-2R but with low-moderate affinity to dimeric IL-2R, varying with the sensitivity of the cell to IL-2. Additionally, IL-2 can bind to IL-2Rα expressed on the surface of activated dendritic cells for trans presentation to neighboring cells including antigen-specific naïve T-cells and NK cells that express both the IL-2Rβ and IL-2Rγc subunits. This trans presentation of IL-2 has been shown to facilitate initial high affinity IL-2 signaling, required early in the immune response to prime naïve T-cells to produce IL-2.

[0170] IL-2 is first captured by IL-2Rα, bringing about a conformational change to IL-2 and increasing its affinity for IL-2Rβ. Association of IL-2 with the IL-2Rβγc subunits induces the dimerization of the signaling motifs in the cytoplasmic tails of IL-2Rβ and IL-2Rγc leading to the phosphorylation/activation of the Janus kinases, JAK1 and JAK3, which in turn exert kinase activity on key tyrosine residues in the tad of the IL-2Rβ subunit.

[0171] Downstream signaling occurs via three major pathways, the JAK-STAT pathway, the phosphoinositide 3-kinase (PI3K)-AKT pathway, and the mitogen-activated protein kinase (MAPK) pathway. These pathways result in the transcription of target genes that contribute to IL-2-dependent biological actions through the recruitment of the adaptor protein Shc and the transcription factor STAT5. Target genes of IL-2 signaling include cyclin D2, bcl-2, fasL, cd25 (encoding IL-2Rα), socs1-2, and the IL-2 silencing gene prdm1, which encodes for the transcription factor, BLIMP1. The production of the negative regulator of IL-2 BLIMP1 maintains the balance between effector T-cells and Treg cells, which is important for immune homeostasis.

[0172] IL-2 plays a dual role in T-cell activation by stimulating the proliferation and differentiation of T-cells as well as by maintaining and expanding the population of immuno-suppressive Treg yells. Naïve CD4+ and CD8+ T-cells express the dimeric IL-2R, and therefore require a high concentration of IL-2 to induce their initial proliferation. Once activated, these T-cells express the high-affinity trimeric driving the differentiation of the T-cells into either effector (Teff) or memory cells. This differentiation depends on the strength and duration of the IL-2 signal.

[0173] During the primary expansion of CD8+ T-cells in the presence of low-to-moderate levels of IL-2, a subset of CD8+ T-cells differentiates into memory T-cells. The cells do this by downregulating CD25 and upregulating CD127 (IL-7R) and CD62 (L-selectin), which are receptors associated with secondary responses upon re-infection. During an acute infection, sustained high levels of IL-2 lead to a rapid up-regulation of CD25 and the differentiation of CD8+ cells into cytotoxic effector cells. The upregulation induces an IL-2-driven expression of the death receptor fas and fasL, causing activation-induced cell death (AICD) upon pathogen clearance. For CD4+ T-cells, the activation of STAT5 signaling by IL-2 influences their differentiation into multiple helper T-cell populations, including Th1, Th2, and Th17 by regulating the expression of the appropriate receptors for each response.

[0174] Homeostatic or background levels of IL-2 are important for the survival and function of Treg cells by maintaining the expression of FOXP3 and CD25. Treg cells naturally occur in the thymus and upon contact with self-peptides become activated. Additionally, Treg cells can be generated by stimulation of conventional CD4+ T-cells upon interaction with antigens in peripheral lymphoid organs. Because Treg cells do not produce IL-2, Treg cells are dependent on IL-2-producing cells such as conventional T-cells. Due to their high expression of IL-2Rα (CD25), Tregs are able to consume and limit the systemic concentration of IL-2, ensuring regulation of the immune balance. In the absence of IL-2, the number of Treg cells decreases and the number of effector T-cells increases, leading to an enhanced susceptibility to autoimmune and inflammatory disorders. Therefore, the unique activation of Treg cells at low levels of IL-2, which does not activate CD4+ or CD8+ T-cells, has allowed for the development of IL-2 as a promising therapeutic in autoimmune and inflammatory diseases.

[0175] The production of IL-2 from both arms of the immune system highlights the importance of this cytokine in the early stages of infection, as well as in the secondary adaptive immune response. Furthermore, the dual functions of IL-2 in both protective immunity and immune tolerance allows IL-2 to be a potential therapeutic in seemingly contrasting therapies, as both an immune stimulant and as an immune suppressor, for cancer and autoimmune disease, respectively.

[0176] IL-2Rβγc ligands provided by the present disclosure comprise an IL-2Rβ ligand, an IL-2Rγc ligand, and an IL-2Rβγc ligand linker coupling the IL-2Rβ and IL-2Rγc ligands. An IL-2Rβγc ligand can be an IL-2R agonist, a partial IL-2R agonist, or an IL-2R antagonist. Because the IL-2Rβγc ligands do not bind to IL-2Rα, the IL-2Rβγc ligands do not preferentially activate Tregs, have the potential for lower receptor-mediated clearance, and can exhibit decreased toxicity.

[0177] Tandem IL-2Rβγc ligands provided by the present disclosure comprise two or more IL-2Rβγc ligands coupled together by one or more tandem linkers.

[0178] IL-2Rβγc constructs provided by the present disclosure can comprise at least one IL-2Rβγc ligand coupled to another molecule referred to as a construct partner such as, for example, a polymer, protein, Fc-fragment, immunoglobulin fragment, or antibody.

[0179] IL-2Rβγc constructs provided by the present disclosure can comprise at least one IL-2Rβ ligand and at least one IL-2Rγc coupled to another molecule referred to as a construct partner such as a polymer, protein, Fc-fragment, immunoglobulin fragment, or antibody.

[0180] An IL-2Rβγc ligand can comprise an IL-2Rβ ligand. Examples of suitable IL-2Rβ ligands are disclosed in U.S. Application Publication No. 2020/0040034 A1, which is incorporated by reference in its entirety.

[0181] An IL-2Rβ ligand provided by the present disclosure can bind to the human IL-2Rβ subunit with an IC₅₀, for example, of less than 100 μM, less than 10 μM, less than 1 μM, less than 0.1 μM, or less than 0.01 μM.

[0182] An IL-2Rβ ligand can bind to the human IL-2Rβ subunit with an IC₅₀, for example, from 1 pM to 100 μM, from 10 pM to 10 μM, from 100 pM to 1 μM, from 0.001 μM to 1 μM, or from 0.01 μM to 1 μM.

[0183] An IL-2Rβ ligand provided by the present disclosure can bind to a mammalian IL-2Rβ subunit with an IC₅₀ of less than 100 μM, less than 10 μM, less than 1 μM, less than 0.1 μM, or less than 0.01 μM.

[0184] An IL-2Rβ ligand can bind to a mammalian IL-2Rβ subunit with an IC₅₀, for example, from 1 pM to 100 μM, from 10 pM to 10 μM, from 100 pM to 1 μM, from 0.001 μM to 1 μM, or from 0.01 μM to 1 μM.

[0185] An IL-2Rβ ligand provided by the present disclosure can bind to each of the human IL-2Rβ subunit and to the human IL-2Rγc subunit with an IC₅₀, for example, of less than 100 μM, less than 10 μM, less than 1 μM, less than 0.1 μM, or less than 0.01 μM.

[0186] An IL-2Rβ ligand can comprise the amino acid sequence of Formula (1) (SEQ ID NO: 805), Formula (1a) (SEQ ID NO: 806), Formula (1b) (SEQ ID NO: 807), Formula (1c) (SEQ ID NO: 808), and/or Formula (1d) (SEQ ID NO: 809):

(1)
-X²¹¹-X²¹²-X²¹³-X²¹⁴-C-X²¹⁵-X²¹⁶-X²¹⁷-X²¹⁸-X²¹⁹-X²²⁰-X²²¹-
X²²²-C-X²²³-X²²⁴-X²²⁵-
(1a)
-X²¹²-X²¹³-X²¹⁴-C-X²¹⁵-X²¹⁶-X²¹⁷-X²¹⁸-X²¹⁹-X²²⁰-X²²¹-X²²²-
C-X²²³-X²²⁴-
(1b)
-X²¹³-X²¹⁴-C-X²¹⁵-X²¹⁶-X²¹⁷-X²¹⁸-X²¹⁹-X²²⁰-X²²¹-X²²²-C-
X²²³-X²²⁴-
(1c)
-X²¹⁴-C-X²¹⁵-X²¹⁶-X²¹⁷-X²¹⁸-X²¹⁹-X²²⁰-X²²¹-X²²²-C-X²²³-
(1d)
-C-X²¹⁵-X²¹⁶-X²¹⁷-X²¹⁸-X²¹⁹-X²²⁰-X²²¹-X²²²-C-

[0187] wherein, X²¹¹ can be selected from an amino acid; X²¹² can be selected from an amino acid comprising an aromatic side chain; X²¹³ can be selected from an amino acid comprising a large hydrophobic side chain or an aromatic side chain; X²¹⁴ can be P; X²¹⁵ can be selected from an amino acid comprising an aromatic side chain; X²¹⁶ can be selected from an amino acid comprising a large hydrophobic side chain; X²¹⁷ can be A; X²¹⁸ can be selected from an amino acid comprising a basic side chain or a polar/neutral side chain; X²¹⁹ can be selected from an amino acid comprising a large hydrophobic side chain; X²²⁰ can be G; X²²¹ can be selected from an amino acid comprising an acidic side chain or a polar/neutral side chain; X²²² can be L; X²²³ can be D; X²²⁴ can be selected from an amino acid comprising a large hydrophobic side chain; and X²²⁵ can be selected from an amino acid comprising an acidic side chain.

[0188] In IL-2Rβ ligands of Formula (1), (1a), (1b), (1c), and/or (1d), X²¹¹ can be selected from an amino acid; X²¹² can be selected from F, H, W, and Y; X²¹³ can be selected from F, H, I, L, M, V, W, and Y; X²¹⁴ can be P; X²¹⁵ can be selected from F, H, W, and Y; X²¹⁶ can be selected from F, I, L, M, V, W, and Y; X²¹⁷ can be A; X²¹⁸ can be selected from K, R, H, N, Q, S, T, and Y; X²¹⁹ can be selected from F, I, L, M, V, W, and Y; X²²⁰ can be G; X²²¹ can be selected from D, E, H, N, Q, S, T, and Y; X²²² can be L; X²²³ can be D; X²²⁴ can be selected from F, I, L, M, V, W, and Y; and X²²⁵ can be selected from D and E.

[0189] In IL-2Rβ ligands of Formula (1), X²¹¹ can be selected from an amino acid.

[0190] In IL-2Rβ ligands of Formula (1), X²¹¹ can be selected from H, K, and R.

[0191] In IL-2Rβ ligands of Formula (1), X²¹¹ can be selected from H and R.

[0192] In IL-2Rβ ligands of Formula (1)-(1a), X²¹² can be selected from F, H, W, and Y.

[0193] In IL-2Rβ ligands of Formula (1)-(1a), X²¹² can be W.

[0194] In IL-2Rβ ligands of Formula (1)-(1b), X²¹³ can be selected from F, H, I, L, M, V, W, and Y.

[0195] In IL-2Rβ ligands of Formula (1)-(1b), X²¹³ can be L.

[0196] In IL-2Rβ ligands of Formula (1)-(1b), X²¹³ can be Y.

[0197] In IL-2Rβ ligands of Formula (1)-(1c), X²¹⁴ can be P.

[0198] In IL-2Rβ ligands of Formula (1)-(1d), X²¹⁵ can be selected from F, H, W, and Y.

[0199] In IL-2Rβ ligands of Formula (1)-(1d), X²¹⁵ can be W.

[0200] In IL-2Rβ ligands of Formula (1)-(1d), X²¹⁶ can be selected from F, I, L, M, V, W, and Y.

[0201] In IL-2Rβ ligands of Formula (1)-(1d), X²¹⁶ can be M.

[0202] In IL-2Rβ ligands of Formula (1)-(1d), X²¹⁷ can be A.

[0203] In IL-2Rβ ligands of Formula (1)-(1d), X²¹⁸ can be selected from K, R, H, N, Q, S, T, and Y.

[0204] In IL-2Rβ ligands of Formula (1)-(1d), X²¹⁸ can be selected from K and R.

[0205] In IL-2Rβ ligands of Formula (1)-(1d), X²¹⁸ can be Q.

[0206] In IL-2Rβ ligands of Formula (1)-(1d), X²¹⁹ can be selected from F, I, L, M, V, W, and Y.

[0207] In IL-2Rβ ligands of Formula (1)-(1d), X²¹⁹ can be L.

[0208] In IL-2Rβ ligands of Formula (1)-(1d), X²²⁰ can be G.

[0209] In IL-2Rβ ligands of Formula (1)-(1d), X²²¹ can be selected from D, E, H, N, Q, S, T, and Y.

[0210] In IL-2Rβ ligands of Formula (1)-(1d), X²²¹ can be E.

[0211] In IL-2Rβ ligands of Formula (1)-(1d), X²²² can be L.

[0212] In IL-2Rβ ligands of Formula (1)-(1c), X²²³ can be D.

[0213] In IL-2Rβ ligands of Formula (1)-(1b), X²²⁴ can be selected from F, I, L, M, V, W, and Y.

[0214] In IL-2Rβ ligands of Formula (1)-(1b), X²²⁴ can be L.

[0215] In IL-2Rβ ligands of Formula (1)-(1a), X²²⁵ can be selected from D and E.

[0216] In IL-2Rβ ligands of Formula (1), (1a), (1b), (1c), and/or (1d), X²¹¹ can be selected from H, K, and R; X²¹² can be W; X²¹³ can be Y; X²¹⁴ can be P; X²¹⁵ can be W; X²¹⁶ can be M; X²¹⁷ can be A; X²¹⁸ can be selected N and Q; X²¹⁹ can be selected from L and V; X²²⁰ can be G; X²²¹ can be selected from E, D, and Q; X²²² can be L; X²²³ can be D; X²²⁴ can be selected from L and M; and X²²⁵ can be selected from D and E.

[0217] In IL-2Rβ ligands of Formula (1), (1a), (1b), (1c), and/or (1d), X²¹¹ can be selected from A, D, E, G, H, L, M, N, Q, R, S, T, and V; X²¹² can be selected from C, F, W, and Y; X²¹³ can be selected from F, H, K, L, N, Q, R, S, W, and Y; X²¹⁴ can be P; X²¹⁵ can be selected from W and Y; X²¹⁶ can be selected from F, I, K, L, M, R, S, T, and V; X²¹⁷ can be A; X²¹⁸ can be selected from D, E, G, H, K, L, N, Q, R, S, and Y; X²¹⁹ can be selected from L, P, and V; X²²⁰ can be selected from G, H, and W; X²²¹ can be selected from D, E, and Q; X²²² can be selected from L and M; X²²³ can be D; X²²⁴ can be selected from L, M, Q, and V; and X²²⁵ can be selected from A, D, E, F, G, H, L, N, Q, T, and V.

[0218] In IL-2Rβ ligands of Formula (1), (1a), (1b), (1c), and/or (1d), X²¹¹ can be selected from H an R; X²¹² can be selected from F and W; X²¹³ can be selected from F, L, W, and Y; X²¹⁴ can be P; X²¹⁵ can be selected from W and Y; X²¹⁶ can be selected from F, I, L, M, and V; X²¹⁷ can be A; X²¹⁸ can be selected D, E, H, K, N, Q, and R; X²¹⁹ can be selected from L and V; X²²⁰ can be G; X²²¹ can be selected from D, E, and Q; X²²² can be selected from L and M; X²²³ can be D; X²²⁴ can be selected L, M, and V; and X²²⁵ can be selected from D and E.

[0219] In IL-2Rβ ligands of Formula (1), (1a), (1b), (1c), and/or (1d), X²¹¹ can be selected from H and R; X²¹² can be W; X²¹³ can be Y; X²¹⁴ can be P; X²¹⁵ can be W; X²¹⁶ can be M; X²¹⁷ can be A; X²¹⁸ can be Q; X²¹⁹ can be L; X²²⁰ can be G; X²²¹ can be Q; X²²² can be L; X²²³ can be D; X²²⁴ can be L; and X²²⁵ can be selected from D and E.

[0220] In IL-2Rβ ligands of Formula (1), (1a), (1b), (1c), and/or (1d), X²¹¹ can be selected from H and R; X²¹² can be W; X²¹³ can be L; X²¹⁴ can be P; X²¹⁵ can be W; X²¹⁶ can be M; X²¹⁷ can be A; X²¹⁸ can be Q; X²¹⁹ can be L; X²²⁰ can be G; X²²¹ can be Q; X²²² can be L; X²²³ can be D; X²²⁴ can be L; and X²²⁵ can be selected from D and E.

[0221] In IL-2Rβ ligands of Formula (1), (1a), (1b), (1c), and/or (1d), X²¹¹ can be selected from H and R; X²¹² can be W; X²¹³ can be Y; X²¹⁴ can be P; X²¹⁵ can be W; X²¹⁶ can be M; X²¹⁷ can be A; X²¹⁸ can be selected from K and R; X²¹⁹ can be L; X²²⁰ can be G; X²²¹ can be Q; X²²² can be L; X²²³ can be D; X²²⁴ can be L; and X²²⁵ can be selected from D and E.

[0222] An IL-2Rβ ligand can comprise an amino acid sequence selected from any one of SEQ ID NOS: 810-903.

SEQ ID NO: 810
Q P C W L A Q V G D L C D L L W P G P L
SEQ ID NO: 811
W L P C W I A R L G D L C D L E
SEQ ID NO: 812
W Y P C W M A L L G E L C D Q E
SEQ ID NO: 813
W Y P C Y R A R L G E L C D L D
SEQ ID NO: 814
W Q R E W R W F P C W M A K L G D M C D L D
SEQ ID NO: 815
Q D E A V E W F P C W M A R L G E L C D L E
SEQ ID NO: 816
Y Y P C W M A R L G E L C D L D
SEQ ID NO: 817
S V V V N N W L P C W M A Q L G E L C D L D
SEQ ID NO: 818
W Y P C W L A Q L G D L C D L D
SEQ ID NO: 819
V M S P T R W L P C W I A K L G E L C D L E
SEQ ID NO: 820
W F P C W M A Q L G Q L C D L E
SEQ ID NO: 821
W R P C W R A Y L G E L C D L E A M P R A T
SEQ ID NO: 822
I R S C S P C W S A D V G E L C D L E C E W
SEQ ID NO: 823
S G H W Y P C W M A R L G E L C D M E E R A
SEQ ID NO: 824
W Y P C W M A Q L G E L C D L Q T M G Y S H
SEQ ID NO: 825
A G D W L P C W M A E L G E L C D L E G P T
SEQ ID NO: 826
W L P C W I A S L G E L C D L D T G K R Q G
SEQ ID NO: 827
W L P C W M A H L G Q L C D L D L P G K S M
SEQ ID NO: 828
E G V F F P C W I A R L G E L C D L D H G L
SEQ ID NO: 829
T G R W K P C W M A G L H E L C D L E G F R
SEQ ID NO: 830
R K H F Y P C W M A Q L G E L C D L E G M P
SEQ ID NO: 831
D I G Y Y P C W M A Q V G D L C D L D D E K
SEQ ID NO: 832
D S D W W P C W M A Q L G E L C D L E D A R
SEQ ID NO: 833
G E R W K P C W I A Q L G E L C D L D F N W
SEQ ID NO: 834
W W P C W M A Q L G E M C D L E Y P Y V P G
SEQ ID NO: 835
Q T K L E G W Y P C W M A Q L G E L C D L D
SEQ ID NO: 836
W G R K E Q W L P C W K A Q L G E L C D L E
SEQ ID NO: 837
V P R A N A W H P C W M A Q L G E L C D L E
SEQ ID NO: 838
G R Q Q K G W Y P C W L A Q L G E L C D M E
SEQ ID NO: 839
W L N R H L F N P C W M A R L G E L C D L E
SEQ ID NO: 840
A Q V R R E W Y P C W M A Q L G E L C D L T
SEQ ID NO: 841
E T E Q M S W Y P C W V A Q L W E L C D L D
SEQ ID NO: 842
W L P C W L A K L G E L C D L E W L P C W
SEQ ID NO: 843
E R R P D T W F P C W R A L V G E L C D L E
SEQ ID NO: 844
W G R N R S W Y P C W M A Q L G E L C D L E
SEQ ID NO: 845
Q D R R S P W Y P C W M A K L G E L C D L A
SEQ ID NO: 846
T R R W Y P C Y L A K L G E L C D L F E G G T R
SEQ ID NO: 847
S E Q W W P C W I A R L G E L C D L D R E L S E
SEQ ID NO: 848
W Y P C W V A Q L G E I C D L E M T G P D S W Y P
SEQ ID NO: 849
Q D G W L P C W M A Q L G E L C D L E Y K R
SEQ ID NO: 850
N R R W Y P C W M A Q L G E L C D L D S R P
SEQ ID NO: 851
F Y P C W M A H L G E L C D L D G D T D S M
SEQ ID NO: 852
K S N F F P C W I A Q L G Q L C D L E P E T
SEQ ID NO: 853
F Y P C W M A N L G E L C D L D F L R E L N
SEQ ID NO: 854
H A S W L P C W L A Q L G E L C D L E P N P
SEQ ID NO: 855
N G A W Y P C W M A Q V G E L C D L E E R W
SEQ ID NO: 856
W R R W Y P C W V A Q V G E L C D L E I E A
SEQ ID NO: 857
R Q A W Y P C W M A Q L G E L C D L E A E L
SEQ ID NO: 858
R Q R W Y P C W M A R L G E L C D L D E P T
SEQ ID NO: 859
N N S R E G W F P C W L A K L G D L C D L D
SEQ ID NO: 860
Y Y P C W M A Q L G E L C D L E
SEQ ID NO: 861
W Y P C W L A Q L G E L C D L D
SEQ ID NO: 862
S W H A E T W Y P C W L A Q V G E L C D L D
SEQ ID NO: 863
K M H K A V W L P C W M A Q V G E L C D L E
SEQ ID NO: 864
D V L G D R W Y P C W I A K L G E L C D L D
SEQ ID NO: 865
W Y P C W M A Q L G E L C D L D
SEQ ID NO: 866
K L Q S W R W Y P C W M A Q L G E L C D L D
SEQ ID NO: 867
N E P E G G F Y P C W L A Q L G E L C D L H
SEQ ID NO: 868
W Y P C W M A R L G E L C D L E
SEQ ID NO: 869
F Y P C W T A L L G E L C D L E P G P P A M
SEQ ID NO: 870
W G T T W R W Y P C W M A Q L G E L C D L E
SEQ ID NO: 871
A K G W D T W K P C W L A N L G E L C D L E
SEQ ID NO: 872
R D E S A G Y Y P C W I A Q L G E L C D L E
SEQ ID NO: 873
W Y P C W I A K L G E L C D L E
SEQ ID NO: 874
W Y P C W I A Q L G E L C D L D
SEQ ID NO: 875
W Y P C W L A K L G E L C D L D
SEQ ID NO: 876
Q G P V R L W Y P C W M A Q L G E L C D L D
SEQ ID NO: 877
W Y P C W M A Q P G E L C D V D
SEQ ID NO: 878
W H P C W I A Q L G E L C D L E
SEQ ID NO: 879
W Y P C W I A Q L G E L C D L E
SEQ ID NO: 880
V R P M G V W Y P C W I A Q L G E L C D L V
SEQ ID NO: 881
V P R W Y P C W I A Q L G E L C D L D S D D
SEQ ID NO: 882
Y R G W L P C W R A K L G D L C D L G Q P M
SEQ ID NO: 883
G E A W Y P C W L A R L G E L C D M D P R V
SEQ ID NO: 884
W Y P C W M A Q L G E L C D L D E S T R L T
SEQ ID NO: 885
I G S W W P C W M A Q L G E L C D L E P E L
SEQ ID NO: 886
G T T W Y P C W L A Q L G E L C D L D V L E
SEQ ID NO: 887
W W P C W M A Q L G D L C D L E E T S G G T
SEQ ID NO: 888
W Y P C W M A Q L G E L C D L G P T E S N L
SEQ ID NO: 889
W Y P C W M A N L G E L C D L E Y P S W A Q
SEQ ID NO: 890
R G M C Y P C W F A R L G E L C D L E C D Q
SEQ ID NO: 891
W Y P C W M A Q L G E L C D L D A G A R H L
SEQ ID NO: 892
K S G W Y P C W M A K L G E L C D L E A Q P
SEQ ID NO: 893
G P R F Y P C W I A Q L G E L C D L E D M G
SEQ ID NO: 894
R V T W Y P C W M A Q L G E L C D L E E S V
SEQ ID NO: 895
W L P C W M A Q L G D L C D L E Q Y V P L P
SEQ ID NO: 896
Y L P C W M A H L G E L C D L D S P L K A R
SEQ ID NO: 897
W Y P C W M A Q L G E L C D L D D H W P A M
SEQ ID NO: 898
W Y P C W R A Q L G E L C D L D P P I A V E
SEQ ID NO: 899
W Y P C W M A N L G E L C D L E A E R S P V
SEQ ID NO: 900
R D Q Y Y P C W M A Q L G E L C D L D E V F
SEQ ID NO: 901
W Y P C W M A Q L G D L C D L E K P V T E R
SEQ ID NO: 902
W Y P C W I A R L G E L C D L E T S G G F P
SEQ ID NO: 903
S G H C Y P C W L A G L G E L C D L N C G

[0223] An IL-2Rβ ligand can comprise an amino acid sequence selected from any one of SEQ ID NOS: 805-903, wherein the amino acid sequence can be terminated with one or more amino acids on the N-terminus, on the C-terminus, or on both the N- and C-termini. For example, an amino acid sequence can include terminal glycines and/or serines. For example, an IL-2Rβ ligand can comprise a -G-G- moiety (SEQ ID NO: 9399) on the N-terminus, on the C-terminus, or on both the N- and C-termini.

[0224] An IL-2Rβ ligand can comprise an amino acid sequence selected from any one of SEQ ID NOS: 805-903, wherein each amino acid independently comprises one or more of the following conservative substitutions: amino acids having a small hydrophobic side chain comprising alanine (A), glycine (G), proline (P), serine (S), or threonine (T); amino acids having a hydroxyl-containing side chain comprising serine (S), threonine (T), or tyrosine (Y); amino acids having an acidic side chain comprising aspartate (D) or glutamate (E); amino acids having a polar-neutral side chain comprising histidine (H), asparagine (N), glutamine (Q), serine (S), threonine (T), or tyrosine (Y); amino acids having a basic side chain comprising arginine (R), lysine (K), or histidine (H); and amino acids having a large hydrophobic side chain comprising isoleucine (I), leucine (L), methionine (M), valine (V), phenylalanine (F), tyrosine (Y), or tryptophan (W); and amino acids having an aromatic side chain comprising phenylalanine (F), histidine (H), tryptophan (W), or tyrosine (Y).

[0225] IL-2Rβ ligands of SEQ ID NOS: 805-903 can bind to the human IL-2Rβ subunit with an IC₅₀ of less than 100 μM.

[0226] An-IL-2Rβ ligand can comprise an amino acid sequence similarity greater than 60%, greater than 70%, greater than 75%, greater than 80%, greater than 85%, greater than 90%, or greater than 95% to the amino acid sequence of any one of SEQ ID NOS: 805-903.

[0227] An IL-2Rβ ligand provided by the present disclosure can comprise a truncated amino acid sequence of any one of SEQ ID NOS: 805-903.

[0228] An IL-2Rβ ligand provided by the present disclosure can comprise an amino acid sequence selected from any one of SEQ ID NOS: 805-903, or a truncated amino acid sequence of any one of SEQ ID NOS: 805-903, wherein the amino acid sequence can independently comprise from 1 to 4 glycines (G) (SEQ ID NO: 9429) on the N-terminus, on the C-terminus, or on both the N- and C-termini.

[0229] An IL-2Rβ ligand provided by the present disclosure can comprise an amino acid sequence selected from any one of SEQ ID NOS: 805-903, or a truncated amino acid sequence of any one of SEQ ID NOS: 805-903, wherein the amino acid sequence comprises one or more amino acid substitutions such as from 1 to 5 amino acid substitutions. The amino acid substitutions can comprise conservative amino acid substitutions.

[0230] An IL-2Rβ ligand can comprise an amino acid sequence having an amino acid sequence similarity greater than 60%, greater than 70%, greater than 75%, greater than 80%, greater than 85%, greater than 90%, or greater than 95% to the amino acid sequence of any one of SEQ ID NOS: 805-903 or to a truncated amino acid sequence of any one of SEQ ID NOS: 805-903.

[0231] An IL-2Rβ ligand of any one of SEQ ID NOS: 805-903 can bind to the hu-IL-2Rβ subunit with an IC₅₀ of less than 10 μM as determined using phage ELISA competition assays.

[0232] An IL-2Rβ ligand of any one of SEQ ID NOS: 805-903, a truncated IL-2Rβ ligand of any one of SEQ ID NOS: 805-903, or a substituted IL-2Rβ ligand of any one of SEQ ID NOS: 805-903 can bind to the hu-IL-2Rβ subunit with an IC₅₀ of less than 100 μM or less than 10 μM as determined using phage ELISA competition assays.

[0233] An IL-2Rβ ligand provided by the present disclosure can comprise the amino acid sequence of Formula (2) (SEQ ID NO: 2575), an amino acid sequence of Formula (2a) (SEQ ID NO: 2576), an amino acid sequence of Formula (2b) (SEQ ID NO: 2577), an amino acid sequence of Formula (2c) (SEQ ID NO: 2578), or an amino acid sequence of Formula (2d) (SEQ ID NO: 2579):

(2)
-X¹-X²-X³-C-X⁴-X⁵-X⁶-X⁷-X⁸-X⁹-X¹⁰-X¹¹-C-X¹²-X¹³-X¹⁴-
(2a)
-X²-X³-C-X⁴-X⁵-X⁶-X⁷-X⁸-X⁹-X¹⁰-X¹¹-C-X¹²-X¹³-
(2b)
-X³-C-X⁴-X⁵-X⁶-X⁷-X⁸-X⁹-X¹⁰-X¹¹-C-X¹²-
(2c)
-C-X⁴-X⁵-X⁶-X⁷-X⁸-X⁹-X¹⁰-X¹¹-C-
(2d)
-X⁴-X⁵-X⁶-X⁷-X⁸-X⁹-X¹⁰-X¹¹-

[0234] wherein,
[0235] X¹ can be selected from E, F, G, I, L, R, S, W, and Y;
[0236] X² can be selected from F, H, K, L, N, Q, S, T, V, W, and Y;
[0237] X³ can be selected from E, G, L, P, and S;
[0238] X⁴ can be selected from E, F, G, H, Q, R, S, W, and Y;
[0239] X⁵ can be selected from E, I, K, L, M, N, R, S, T, and V;
[0240] X⁶ can be selected from A, D, G, and Y;
[0241] X⁷ can be selected from A, C, D, E, G, H, K, L, N, Q, R, S, and T;
[0242] X⁸ can be selected from D, F, L, M, P, R, and V;
[0243] X⁹ can be selected from G, R W, and Y;
[0244] X¹⁰ can be selected from A, D, E, Q, W, and Y;
[0245] X¹¹ can be selected from I, L, Q, V, and Y;
[0246] X¹² can be selected from D, E, G, H, V, and Y;
[0247] X¹³ can be selected from D, F, H, I, K, L, M, and V; and
[0248] X¹⁴ can be selected from A, D, E, G, H, K, L, N, Q, V, and W.

[0249] In an IL-2Rβ ligand of Formula (2)-(2d), X¹ can be selected from S, W, and Y.

[0250] In an IL-2Rβ ligand of Formula (2)-(2d), X¹ can be W.

[0251] In an IL-2Rβ ligand of Formula (2)-(2d), X² can be selected from K, L, W, and Y.

[0252] In an IL-2Rβ ligand of Formula (2)-(2d), X³ can be P.

[0253] In an IL-2Rβ ligand of Formula (2)-(2d), X⁴ can be W.

[0254] In an IL-2Rβ ligand of Formula (2)-(2d), X⁵ can be selected from I, L, and M

[0255] In an IL-2Rβ ligand of Formula (2)-(2d), X⁶ can be A.

[0256] In an IL-2Rβ ligand of Formula (2)-(2d), X⁷ can be Q.

[0257] In an IL-2Rβ ligand of Formula (2)-(2d), X⁸ can be L

[0258] In an IL-2Rβ ligand of Formula (2)-(2d), X⁹ can be G

[0259] In an IL-2Rβ ligand of Formula (2)-(2d), X¹⁰ can be selected from D and E.

[0260] In an IL-2Rβ ligand of Formula (2)-(2d), X¹¹ can be L.

[0261] In an IL-2Rβ ligand of Formula (2)-(2d), X¹² can be selected from D and E.

[0262] In an IL-2Rβ ligand of Formula (2)-(2d), X¹³ can be L.

[0263] In an IL-2Rβ ligand of Formula (2)-(2d), X¹⁴ can be selected from D and E.

[0264] In an IL-2Rβ ligand of Formula (2)-(2d), the IL-2Rβ ligand can be defined by any combination of X¹ to X¹⁴ as defined in the immediately preceding sixteen (16) paragraphs.

[0265] In an IL-2Rβ ligand of Formula (2)-(2d),

[0266] X¹ can be selected from S, W, and Y;

[0267] X² can be selected from K, L, W, and Y;

[0268] X³ can be P;

[0269] X⁴ can be W;

[0270] X⁵ can be selected from I, L, and M;

[0271] X⁶ can be A;

[0272] X⁷ can be Q;

[0273] X⁸ can be L;

[0274] X⁹ can be G;

[0275] X¹⁰ can be selected from D and E;

[0276] X¹¹ can be L;

[0277] X¹² can be selected from D and E;

[0278] X¹³ can be L; and

[0279] X¹⁴ can be selected from D and E.

[0280] In an IL-2Rβ ligand of Formula (2)-(2d),

[0281] X¹ can be W;

[0282] X² can be selected from K, L, W, and Y;

[0283] X³ can be P;

[0284] X⁴ can be W;

[0285] X⁵ can be selected from I, L, and M;

[0286] X⁶ can be A;

[0287] X⁷ can be Q;

[0288] X⁸ can be L;

[0289] X⁹ can be G;

[0290] X¹⁰ can be selected from D and E;

[0291] X¹¹ can be L;

[0292] X¹² can be selected from D and E;

[0293] X¹³ can be L; and

[0294] X¹⁴ can be selected from D and E.

[0295] An IL-2Rβ ligand can comprise the amino acid sequence of any one of SEQ ID NOS: 2580-2655.

SEQ ID NO: 2580
V R A W Y P C W I A R L G E L C D L E V D
SEQ ID NO: 2581
W F P C W M A Q L G E V C D L D
SEQ ID NO: 2582
W Y P C H M A K L R E L C D L D
SEQ ID NO: 2583
S L P C W M A Q L G D L C E L H
SEQ ID NO: 2584
S N P C W M A Q L W E L C D L E
SEQ ID NO: 2585
Y K P C W I A Q L G E L C E L E
SEQ ID NO: 2586
W Q P C W M A Q L G E L C D L E
SEQ ID NO: 2587
W K P C W L A Q L G D L C E M E
SEQ ID NO: 2588
W L P C W M A K L G D L C E L E
SEQ ID NO: 2589
W L P C W M A Q L G E L C V M E
SEQ ID NO: 2590
L H P C W M A Q L G E L C D L E
SEQ ID NO: 2591
S L P C W M A Q L G E L C D L V
SEQ ID NO: 2592
W K P C W M A G L G E L C E L D
SEQ ID NO: 2593
W W P C S S A E L G E I C D F D
SEQ ID NO: 2594
W Q P C W R A K L G E L C D L E
SEQ ID NO: 2595
W S P C W I A T L G E L C D L D
SEQ ID NO: 2596
W N P C W I A Q L G D L C D M V
SEQ ID NO: 2597
W L P C W L A H L G D I C D L Q
SEQ ID NO: 2598
W L S P P S Y L P C W M A Q L G E L C D L V
SEQ ID NO: 2599
W D V H A I R N P C W L A K L G D L C D L D
SEQ ID NO: 2600
G A G V L H R W P C W M A K L G D L C D L D
SEQ ID NO: 2601
D T G R D G W K P C W M A L L G E L C E L E
SEQ ID NO: 2602
E Q G M L G Y F P C W K A L L G D V C D L D
SEQ ID NO: 2603
W R V T A S L Q P C W M A Q L G E L C D L N
SEQ ID NO: 2604
G Q V V E T S L P C W E A Q L G E L C V L D
SEQ ID NO: 2605
T V G Q F E W Y P C S T A Q L G E L C D L D
SEQ ID NO: 2606
A L V G G T F Y P C Y V A H L G E L C D I E
SEQ ID NO: 2607
I D R A D G W K P C W I A Q V G E L C V L E
SEQ ID NO: 2608
Y R R E R V E F P C W L A Q L G E L C D K E
SEQ ID NO: 2609
A V S H G N W L P C Y I A Q L G E L C D L D
SEQ ID NO: 2610
I P K G E S W F P C W M A A M G E L C D L E
SEQ ID NO: 2611
W Y P C W I A Q L G E V C D L E K Q T G S V
SEQ ID NO: 2612
W Y P C W M A H L G D V C D L E S F G Q T E
SEQ ID NO: 2613
Y K P C Q M A Q L G E L C D L D V D N K A E
SEQ ID NO: 2614
F K P C W I A N L G E L C D M D D E R S S E
SEQ ID NO: 2615
W K P C W M A R L G E L C D I E D T K V N A
SEQ ID NO: 2616
S L P C W I A R L G E L C D L D G Y D G E E
SEQ ID NO: 2617
F Y P C W K A R L G E L C E L E E L R G Y Y
SEQ ID NO: 2618
W K P C W I A D L G E L C D L A P A W H E Y
SEQ ID NO: 2619
R L P C W R A Q L G D L C E L D W G L D M G
SEQ ID NO: 2620
S K P C W M A Q L G E L C D L D V W N L Q M
SEQ ID NO: 2621
G Y P C W L A Q L G D Y C D L D A G A P S W
SEQ ID NO: 2622
S W P C W M A Q L G D L C D L D G S A G A S
SEQ ID NO: 2623
W K P C W L A Q L G E L C D L E R P S T T S
SEQ ID NO: 2624
W Y S C G K A Q L G E L C D L D V E S Q P G
SEQ ID NO: 2625
Y V P C Y M A R L G E L C E L E A N R P G Q
SEQ ID NO: 2626
S K P C W L A Q L G D L C D F D W T A A D H
SEQ ID NO: 2627
W F P C W M A Q L G D L C E L E P D S V P A
SEQ ID NO: 2628
W T P C W I A H L G D L C D L E P Q D D T D
SEQ ID NO: 2629
W K P C F I A S L G E L C D L D Q G S V E V
SEQ ID NO: 2630
W K P C W M A A L G E L C D L E R S V G K V
SEQ ID NO: 2631
W K P C W R A Q L G E L C D L E L G P S E R
SEQ ID NO: 2632
F F P C W M G Q L G D L C D L E V R S M Q K
SEQ ID NO: 2633
Y W P C S M A S L G E L C D L E W Q G R L P
SEQ ID NO: 2634
W Y P C Y M A S L G E L C D L Q S S I S P R
SEQ ID NO: 2635
W Y P C W M A Q L G E L C D H E W P S Y G A
SEQ ID NO: 2636
M G S W L P C W M A Q L G D L C D V E G G M
SEQ ID NO: 2637
Q K G F L P C W R A Q L G Q L C D M E S Q Y
SEQ ID NO: 2638
G S G W Q P C W M A D L G E L C D L D N E K
SEQ ID NO: 2639
W R R W Y P C W M A Q L G E L C D L D Q W T
SEQ ID NO: 2640
R R S W Y P C R I A Q L G E L C D L D P R V
SEQ ID NO: 2641
A Y R I Y P C W K A Q L G E L C D L D N A D
SEQ ID NO: 2642
Q R N S F P C W L A Q L G D L C D L G D W A
SEQ ID NO: 2643
Q P A W L P C W L A Q L G E L C D L G T G A
SEQ ID NO: 2644
S R F W Q P C W M A Q L G E L C H L D P Q M
SEQ ID NO: 2645
Y L N F N P C W T A Q L G E L C D L A S G E
SEQ ID NO: 2646
S T G W Y P C W I A E F G E L C D L V K P H
SEQ ID NO: 2647
A H W S Q P C W T A Q L G E L C D L D M G D
SEQ ID NO: 2648
H P V R Y P C W V A Q L G E L C D L E N G N
SEQ ID NO: 2649
Q T G S Y P C W I A H L G E L C D L E G S A
SEQ ID NO: 2650
T G W W Y P C W M A Q L G E L C D L Q Q T
SEQ ID NO: 2651
D L W Q P C W M A R L G E L C D L K G
SEQ ID NO: 2652
M G T G W Q N Y C R Y A Q L G E L C L L
SEQ ID NO: 2653
W Y P C G V A Q P G D L C D L E
SEQ ID NO: 2654
M L G E W L C E M D Q L G Y L C Y L D H G D
SEQ ID NO: 2655
W D G W E C G M D H D G W V C E F W G E

[0296] An IL-2Rβ ligand provided by the present disclosure can comprise a truncated amino acid sequence of any one of SEQ ID NOS: 2575-2655.

[0297] An IL-2Rβ ligand provided by the present disclosure can comprise an amino acid sequence selected from any one of SEQ ID NOS: 2575-2655, or a truncated amino acid sequence of any one of SEQ ID NOS: 2575-2655, wherein the amino acid sequence can independently comprise from 1 to 4 glycines (SEQ ID NO: 9429) on the N-terminus, on the C-terminus, or on both the N- and C-termini.

[0298] An IL-2Rβ ligand provided by the present disclosure can comprise an amino acid sequence selected from any one of SEQ ID NOS: 2575-2655, or a truncated amino acid sequence of any one of SEQ ID NOS: 2575-2655, wherein the amino acid sequence comprises one or more amino acid substitutions such as from 1 to 5 amino acid substitutions. The amino acid substitutions can comprise conservative amino acid substitutions.

[0299] An IL-2Rβ ligand can comprise an amino acid sequence having an amino acid sequence similarity greater than 60%, greater than 70%, greater than 75%, greater than 80%, greater than 85%, greater than 90%, or greater than 95% to the amino acid sequence of any one of SEQ ID NOS: 2575-2655 or to a truncated amino acid sequence of any one of SEQ ID NOS: 2575-2655.

[0300] An IL-2Rβ ligand of any one of SEQ ID NOS: 2575-2655, a truncated IL-2Rβ ligand of any one of SEQ ID NOS: 2575-2655, or a substituted IL-2Rβ ligand of any one of SEQ ID NOS: 2575-2655 bind to the hu-IL-2Rβ subunit with an IC₅₀ of less than 100 μM or less than 10 μM and/or to the cyno-IL-2Rβ subunit with an IC₅₀ of less than 100 μM or less than 10 μM as determined using phage ELISA competition assays.

[0301] An IL-2Rβ ligand of any one of SEQ ID NOS: 2580-2655 bound to the hIL-2Rβ subunit with an IC₅₀ of less than 100 μM as determined using phage ELISA competition assays.

[0302] An IL-2Rβ ligand provided by the present disclosure can comprise the amino acid sequence of Formula (3) (SEQ ID NO: 2661), an amino acid sequence of Formula (3a) (SEQ ID NO: 2662), an amino acid sequence of Formula (3b) (SEQ ID NO: 2663), an amino acid sequence of Formula (3c) (SEQ ID NO: 2664), an amino acid sequence of Formula (3d) (SEQ ID NO: 2665), an amino acid sequence of Formula (3e) (SEQ ID NO: 2666):

(3)
-X¹-X²-X³-X⁴-C-X⁵-X⁶-X⁷-X⁸-X⁹-X¹⁰-X¹¹-X¹²-C-X¹³-X¹⁴-
X¹⁵-X¹⁶-X¹⁷-
(3a)
-X²-X³-X⁴-C-X⁵-X⁶-X⁷-X⁸-X⁹-X¹⁰-X¹¹-X¹²-C-X¹³-X¹⁴-X¹⁵-
(3b)
-X³-X⁴-C-X⁵-X⁶-X⁷-X⁸-X⁹-X¹⁰-X¹¹-X¹²-C-X¹³-X¹⁴-
(3c)
-X⁴-C-X⁵-X⁶-X⁷-X⁸-X⁹-X¹⁰-X¹¹-X¹²-C-X¹³-
(3d)
-C-X⁵-X⁶-X⁷-X⁸-X⁹-X¹⁰-X¹¹-X¹²-C-
(3e)
-X⁵-X⁶-X⁷-X⁸-X⁹-X¹⁰-X¹¹-X¹²-

[0303] wherein,
[0304] X¹ can be selected from A, D, E, F, G, H, I, K, L, M, N, P, Q, R, S, T, V, W, and Y;
[0305] X² can be selected from C, D, F, G, I, L, M, R, S, V, W, and Y;
[0306] X³ can be selected from A, D, F, H, K, L, N, P, Q, R, S, T, V, W, and Y;
[0307] X⁴ can be selected from A, D, F, L, N, P, Q, S, T, and W;
[0308] X⁵ can be selected from D, E, F, G, L, M, Q, R, S, W, and Y;
[0309] X⁶ can be selected from A, F, I, K, L, M, N, Q, R, S, V, W, and Y;
[0310] X⁷ can be selected from A, D, E, I, S, T, V, and W;
[0311] X⁸ can be selected from A, E, F, G, H, K, L, N, P, Q, R, S, V, W, and Y;
[0312] X⁹ can be selected from A, E, I, L, M, P, Q V, and W;
[0313] X¹⁰ can be selected from F, G, and V;
[0314] X¹¹ can be selected from D, E, N, P, Q, S, V, W, and Y;
[0315] X¹² can be selected from D, F, H, I, L, M, Q, S, T, V, and W;
[0316] X¹³ can be selected from A, D, E, L, N, Q, S, T, and V;
[0317] X¹⁴ can be selected from A, E, F, I, K, L, M, Q, R S, T V, and W;
[0318] X¹⁵ can be selected from A, D, E, F, G, I, K, L, N, P, Q, R, T, V, W, and Y;
[0319] X¹⁶ can be selected from A, C, D, E, F, G, H, I, L, M, N, P, Q, R, S, T, V, W, and Y; and
[0320] X¹⁷ can be selected from A, D, E, F, G, H, I, K, L, M N, P, Q, R, S, T, V, W, and Y.

[0321] In an IL-2Rβ ligand of Formula (3)-(3e), X¹ can be selected from A, D, E, G, R, S, T, V, and W.

[0322] In an IL-2Rβ ligand of Formula (3)-(3e), X¹ can be selected from G, R, and W.

[0323] In an IL-2Rβ ligand of Formula (3)-(3e), X² can be selected from F, L, S, V, W, and Y

[0324] In an IL-2Rβ ligand of Formula (3)-(3e), X² can be selected from F and W.

[0325] In an IL-2Rβ ligand of Formula (3)-(3e), X³ can be selected from F, H, K, L, N, Q, W, and Y.

[0326] In an IL-2Rβ ligand of Formula (3)-(3e), X³ can be selected from F, H, L, W, and Y.

[0327] In an IL-2Rβ ligand of Formula (3)-(3e), X⁴ can be selected from D and P.

[0328] In an IL-2Rβ ligand of Formula (3)-(3e), X⁵ can be selected from F, L, S, W, and Y.

[0329] In an IL-2Rβ ligand of Formula (3)-(3e), X⁵ can be selected from F, W, and Y.

[0330] In an IL-2Rβ ligand of Formula (3)-(3e), X⁶ can be selected from F, I, K, L, M, R, and V.

[0331] In an IL-2Rβ ligand of Formula (3)-(3e), X⁶ can be selected from I, L, and M.

[0332] In an IL-2Rβ ligand of Formula (3)-(3e), X⁷ can be A.

[0333] In an IL-2Rβ ligand of Formula (3)-(3e), X⁸ can be selected from H, K, L, Q, R, and S.

[0334] In an IL-2Rβ ligand of Formula (3)-(3e), X⁸ can be Q.

[0335] In an IL-2Rβ ligand of Formula (3)-(3e), X⁹ can be selected from I, L, and V.

[0336] In an IL-2Rβ ligand of Formula (3)-(3e), X⁹ can be selected from L and V.

[0337] In an IL-2Rβ ligand of Formula (3)-(3e), X¹⁰ can be G.

[0338] In an IL-2Rβ ligand of Formula (3)-(3e), X¹¹ can be selected from D and E.

[0339] In an IL-2Rβ ligand of Formula (3)-(3e), X¹¹ can be E.

[0340] In an IL-2Rβ ligand of Formula (3)-(3e), X¹² can be selected from L and V.

[0341] In an IL-2Rβ ligand of Formula (3)-(3e), X¹² can be L.

[0342] In an IL-2Rβ ligand of Formula (3)-(3e), X¹³ can be selected from D and E.

[0343] In an IL-2Rβ ligand of Formula (3)-(3e), X¹³ can be D.

[0344] In an IL-2Rβ ligand of Formula (3)-(3e), X¹⁴ can be selected from F, I, L, and M.

[0345] In an IL-2Rβ ligand of Formula (3)-(3e), X¹⁴ can be L.

[0346] In an IL-2Rβ ligand of Formula (3)-(3e), X¹⁵ can be selected from D, E, F, G, and V.

[0347] In an IL-2Rβ ligand of Formula (3)-(3e), X¹⁵ can be selected from D, E, F, and G.

[0348] In an IL-2Rβ ligand of Formula (3)-(3e), X¹⁶ can be selected from D, E, G, K, P, V, and W.

[0349] In an IL-2Rβ ligand of Formula (3)-(3e), X¹⁶ can be G.

[0350] In an IL-2Rβ ligand of Formula (3)-(3e), X¹⁷ can be selected from A, E, G, P, Q, S, T, V, and W.

[0351] In an IL-2Rβ ligand of Formula (3)-(3e), X¹⁷ can be G.

[0352] In an IL-2Rβ ligand of Formula (3)-(3e), the IL-2Rβ ligand can be defined by any combination of X¹ to X¹⁷ as defined in the immediately preceding thirty one (31) paragraphs.

[0353] In an IL-2Rβ ligand of Formula (3)-(3e),

[0354] X¹ can be selected from A, D, E, G, R, S, T, V, and W;

[0355] X² can be selected from F, L, S, V, W, and Y;

[0356] X³ can be selected from F, H, K, L, N, Q, W, and Y;

[0357] X⁴ can be selected from D and P;

[0358] X⁵ can be selected from F, L, S, W, and Y;

[0359] X⁶ can be selected from F, I, K, L, M, R, and V;

[0360] X⁷ can be A;

[0361] X⁸ can be selected from H, K, L, Q, R, and S;

[0362] X⁹ can be selected from I, L, and V;

[0363] X¹⁰ can be G;

[0364] X¹¹ can be selected from D and E;

[0365] X¹² can be selected from L and V;

[0366] X¹³ can be selected from D and E;

[0367] X¹⁴ can be selected from F, I, L, and M;

[0368] X¹⁵ can be selected from D, E, F, G, and V;

[0369] X¹⁶ can be selected from D, E, G, K, P, V, and W;

[0370] X¹⁷ can be selected from A, E, G, P, Q, S, T, V, and W.

[0371] In an IL-2Rβ ligand of Formula (3)-(3e),
[0372] X¹ can be selected from G, R, and W;
[0373] X² can be selected from F and W;
[0374] X³ can be selected from F, H, L, W, and Y;
[0375] X⁴ can be selected from D and P;
[0376] X⁵ can be selected from F, W, and Y;
[0377] X⁶ can be selected from I, L, and M;
[0378] X⁷ can be A;
[0379] X⁸ can be Q;
[0380] X⁹ can be selected from L and V;
[0381] X¹⁰ can be G;
[0382] X¹¹ can be E;
[0383] X¹² can be L;
[0384] X¹³ can be D;
[0385] X¹⁴ can be L;
[0386] X¹⁵ can be selected from D, E, F, and G;
[0387] X¹⁶ can be G; and
[0388] X¹⁷ can be G.

[0389] An IL-2Rβ ligand can comprise the amino acid sequence of any one of SEQ ID NO: 2667-2891.

SEQ ID NO: 2667
W Y P C W I A Q L G E L C D L D A K G Q R R
SEQ ID NO: 2668
T N N F Y P C W L A K L G D L C D F D D L N
SEQ ID NO: 2669
W Y P C W I A R V G E L C D L E E G P V N R
SEQ ID NO: 2670
A V E F Y P C W L A R I G E L C D L V E P
SEQ ID NO: 2671
W Y P C W I A H L G E L C D L E
SEQ ID NO: 2672
W Y P C W I A R V G E L C D M E
SEQ ID NO: 2673
R R E W Y P C W I A Q V G E L C D L P L I
SEQ ID NO: 2674
R W P W Y P C E I A R I G E L C D L E Q A N
SEQ ID NO: 2675
F G A F Y P C W K A Q L G E L C D L E P V T
SEQ ID NO: 2676
H G R W F P C W M A Q V G D L C D L E H S N
SEQ ID NO: 2677
W Y P C W L A K L G E L C D L D R A E A L P
SEQ ID NO: 2678
V W F P C W F A Q L G D L C D L D Q D P
SEQ ID NO: 2679
E T L G S V W Y P C W I A S I G E L C D L D
SEQ ID NO: 2680
W Y S C W I A Q L G E L C D L D D M G D R V
SEQ ID NO: 2681
W F P C W L A Q L G E L C D K E
SEQ ID NO: 2682
W Y P C W I A Q L G E L C D L V
SEQ ID NO: 2683
S H L W F P C W M A Q L G E L C D L E G G P
SEQ ID NO: 2684
R R W L P C W M A H V G E L C D L E L G N
SEQ ID NO: 2685
Y W C W F A R V G E L C D L D D G G V P S
SEQ ID NO: 2686
W Y S C W I A Q I G E L C D L E
SEQ ID NO: 2687
M N P V G T F Y P C W I A K L G E L C D L Q
SEQ ID NO: 2688
H G G V I G W Y P C W M A K V G E L C D L D
SEQ ID NO: 2689
W Y P C S I A L L G E L C D L E S V H E K S
SEQ ID NO: 2690
E Q R N R Q W W P C W L A R L G D L C D L D
SEQ ID NO: 2691
W Y P C W L A Q L G E L C D L D
SEQ ID NO: 2692
W L P C W M A H L G D L C D L E
SEQ ID NO: 2693
R P S W A P C W L A Q V G E L C D L D H P E
SEQ ID NO: 2694
E S K E P A F W P C W M A Q L G D L C D L E
SEQ ID NO: 2695
R S L R E S W F P C W M A K L G D L C D L E
SEQ ID NO: 2696
W H P C W L A R V G D L C D L D
SEQ ID NO: 2697
S R S A G E Y Y P C W L A Q L G E L C D L A
SEQ ID NO: 2698
R Q V P K Q W Y P C W M A A L G E L C D L E
SEQ ID NO: 2699
W Y P C W L A H L G E L C D L E
SEQ ID NO: 2700
Q V M R L W Y P C W M A Q L G E L C D L E
SEQ ID NO: 2701
W Y P C W M A Q L G E L C D L D E A P V Q P
SEQ ID NO: 2702
R D I W W P C W V A Q L G E L C D L D D P Q
SEQ ID NO: 2703
S A T W Y P C F L A N L G E L C D L E Q E N
SEQ ID NO: 2704
Y A E W Y P C W M A R V G E V C D L E V T P
SEQ ID NO: 2705
R S G D K A F F P C W L A Q L G D L C D L D
SEQ ID NO: 2706
W Y P C W M A Q L G E L C D M D
SEQ ID NO: 2707
R V S Y P C W L A R L G E L C D M D L E E
SEQ ID NO: 2708
T E S W Y P C W L A N L G D L C D L E W S A
SEQ ID NO: 2709
W L P C W M A D V G D L C D L D
SEQ ID NO: 2710
W H P C W M A R L G E L C D L D
SEQ ID NO: 2711
Q G T K W H W N P C W M A Q L G E L C D L D
SEQ ID NO: 2712
K N G P K S W Y P C W M A Q V G D L C D L D
SEQ ID NO: 2713
S G T G P A W Y P C F L A S L G Q L C D L E
SEQ ID NO: 2714
W Y P C W M A R M G E L C D L E
SEQ ID NO: 2715
W L P C W R A Q L G Q L C D L D
SEQ ID NO: 2716
L F P C W L A Q L G E L C D L E
SEQ ID NO: 2717
R Y P C W I A Q L G E L C D L D
SEQ ID NO: 2718
W H P C W I A H L G E L C D L E
SEQ ID NO: 2719
M Y P C W I A H L G E L C D L D
SEQ ID NO: 2720
W Y P C S I A S L G E L C D L E
SEQ ID NO: 2721
W L P C Y M A Q L G D L C D L E
SEQ ID NO: 2722
W H P C W M A Q V G E V C D L D
SEQ ID NO: 2723
W Y P C W L A S L G E V C D L E
SEQ ID NO: 2724
W W P C S I A R L G Q L C D L D
SEQ ID NO: 2725
W Y P C W L A H L G E L C D L A
SEQ ID NO: 2726
W Y P C W L A Q L G E L C D A E
SEQ ID NO: 2727
W K P C W M A L L G E L C D L E
SEQ ID NO: 2728
R Y P C W R A K L G E L C D L D
SEQ ID NO: 2729
E E Q S R G F L P C W M A L L G E L C D L D
SEQ ID NO: 2730
L G S K R Q W Y P C W V A H L G E L C D L E
SEQ ID NO: 2731
E S E G R G W Y P C W N A L L G E L C D L E
SEQ ID NO: 2732
R W T Q A Q W Y P C W L A Q L G E L C D L E
SEQ ID NO: 2733
L H A G R W N P C W L A Q L G E L C D L E
SEQ ID NO: 2734
L S S K G W Y P C W K A R L G D L C D L E
SEQ ID NO: 2735
D M F T H R W Y P C S M A K L G E L C D L E
SEQ ID NO: 2736
M T D R A F W N P C W V A R L G E L C D L D
SEQ ID NO: 2737
N V T Y T Q W F P C W L A R L G E L C D L V
SEQ ID NO: 2738
V R I R I W Y P C W S A Q L G E L C D L D
SEQ ID NO: 2739
A M A R R Y L P C W I A K L G E L C E L D
SEQ ID NO: 2740
A R G E Y R W F P C W M A R L G E L C D L E
SEQ ID NO: 2741
Y L E R S R W Y P C F I A Q L G E L C D L E
SEQ ID NO: 2742
F R V S R D W F P C W M A Q L G E V C D L E
SEQ ID NO: 2743
I E R A W E W R P C W L A S V G E L C D L E
SEQ ID NO: 2744
V A S E R F Y P C W I A R L G E L C D V E
SEQ ID NO: 2745
W Y P C W I A K L G E V C D L D Q G T I R Q
SEQ ID NO: 2746
W Y P C W L A H L G E L C D L D W K G R N D
SEQ ID NO: 2747
W Y P C W R A Q L G E L C D L V D L G S H L
SEQ ID NO: 2748
W S P C W M A S L G D L C D L E E T R Q T E
SEQ ID NO: 2749
W T P C W I A Q L G E L C D L E G R H G T V
SEQ ID NO: 2750
L P C W I A Q L G D L C D L E P E P S P E
SEQ ID NO: 2751
F Y P C W A A H L G D L C D L E Y Q E A G P
SEQ ID NO: 2752
W L P C W L A P L G D L C D M D M S A V M N
SEQ ID NO: 2753
W R P C W M A H L G D L C D L E M A N E N P
SEQ ID NO: 2754
W Y P C W L A Q L G E V C D L D D G G G V F
SEQ ID NO: 2755
W W P C W L A Q L G E L C D L E V N G S L I
SEQ ID NO: 2756
T E M W Y P C W M A Y Q G E L C D L D M T Y
SEQ ID NO: 2757
A R T W W P C W R A K L G E L C D L V V P E
SEQ ID NO: 2758
H Q G F Y S C R L A R L G E L C D L D T G W
SEQ ID NO: 2759
V D E F Y P C S M A G L G E L C D L E R Q N
SEQ ID NO: 2760
A W D W Y P C S V A A L G E I C D L D I Q D
SEQ ID NO: 2761
R P P W Y P C W M A R L G E V C D M D I M L
SEQ ID NO: 2762
S Q R W Y P C W V A H L G E L C D L E G V V
SEQ ID NO: 2763
K G S W Q P C W F A K L G E L C D L H P T S
SEQ ID NO: 2764
Q T W Y L P C W M A K L G E L C D L G E R D
SEQ ID NO: 2765
E P R W Y P C W M A Q M G E L C D M E M S D
SEQ ID NO: 2766
W G G R Y W C W M A K L G D L C D L E D E W
SEQ ID NO: 2767
W W P C W I A Q V G E L C D L D G P G R P T
SEQ ID NO: 2768
R L V Y D C L F A Q V G D L C E V I S
SEQ ID NO: 2769
W R I L W M Q Q C W R S H V V N Q C A L
SEQ ID NO: 2770
W Y P C W I A Q V G E L C D L D E V S H G R
SEQ ID NO: 2771
T G E W W P C W V A E V G E L C D L E R G P
SEQ ID NO: 2772
A R T Q G W Y D C L F A Q V G E L C D L
SEQ ID NO: 2773
F H P C W R A L L G E L C D L E T A L G P S
SEQ ID NO: 2774
L Q I R K L W A C R I D L V G P F C L L
SEQ ID NO: 2775
A E Y S G R Y D C Y I A K V G E L C D I
SEQ ID NO: 2776
S W R F L W Q D C G R A H V G E L C D L
SEQ ID NO: 2777
N R W W H P C W M A R V G E L C D L E P D A
SEQ ID NO: 2778
W W P C W V A K L G E L C D L E G D A S R V
SEQ ID NO: 2779
W Y P C E F A Q L G E L C D L L P F P Y P A
SEQ ID NO: 2780
S Y M H D C F M A Q V G D L C D R F I S
SEQ ID NO: 2781
W W P C W I A Q V G E L C D L E E E S R E S
SEQ ID NO: 2782
K W A W N P C Y I A R L G E L C D L V E P E
SEQ ID NO: 2783
W W P C W I A D L G E L C D L E G P P R G R
SEQ ID NO: 2784
P T L I T W Y D C L F A E V G E L C D M
SEQ ID NO: 2785
E I S N W F L D C M F A D V G D L C D L
SEQ ID NO: 2786
A Q V W Y P C W L A K V G E L C D L D Q W N
SEQ ID NO: 2787
F G G K M D W Y P C W I A N L G E L C D L K
SEQ ID NO: 2788
W F P C W M A K V G D L C D V D E H Q D P S
SEQ ID NO: 2789
M G D S S S W F P C W M A Q L G E L C D M E
SEQ ID NO: 2790
M F R Y Y P C W I A S I G E L C D L E W G V
SEQ ID NO: 2791
E R R W Y P C W L A S V G E L C D L D M G D
SEQ ID NO: 2792
W Y P C W V A Q L G E L C D L E
SEQ ID NO: 2793
R W D Y W P C Y I A Q V G E L C D L E V Y E
SEQ ID NO: 2794
S L A H R S W Y P C W L A Q V G E L C D L D
SEQ ID NO: 2795
Q N A S K G W Y P C W I A H V G E L C D W D
SEQ ID NO: 2796
H R W Y P C W L A H L G E L C D L D P M S
SEQ ID NO: 2797
F Y P C W I A F V G E L C D L E
SEQ ID NO: 2798
E G H W Y P C W I A Q L G E L C D L D W
SEQ ID NO: 2799
W T G W S A F Y P C S I A N L G E L C D L D
SEQ ID NO: 2800
W E K L Q N W Y P C W I A Q M G E L C D L E
SEQ ID NO: 2801
T N G V L D W W P C W M A Q V G E L C D L D
SEQ ID NO: 2802
W Y P C W V A K L G E L C D L E
SEQ ID NO: 2803
A Y Y P C E L A Q L G E L C D L Y N I
SEQ ID NO: 2804
W Y P C W M A H L G E L C D L E
SEQ ID NO: 2805
N D H T A W W P C Y F A Q V G D L C D L V
SEQ ID NO: 2806
W W P C E I A Q I G E L C D L E W V R H A E
SEQ ID NO: 2807
W W P C D F A Q I G E L C D L G P R F T G E
SEQ ID NO: 2808
R D W W L P C E F A L I G E L C D L E R S W
SEQ ID NO: 2809
M R T I F W Y D C Y I A Q V G E L C D F
SEQ ID NO: 2810
S W H A E T W Y P C W L A Q V G E L C D L D
SEQ ID NO: 2811
E W F H D C F L A K V G D L C D L F L W
SEQ ID NO: 2812
S G K T Q M W N P C Y V A K V G E L C D L V
SEQ ID NO: 2813
D K A G P N F Y P C W L A H V G E L C D Q A
SEQ ID NO: 2814
A G F R G R W W P C E Y A Q V G E L C D L E
SEQ ID NO: 2815
W F P C W L A K V G E L C D R D D L A G P S
SEQ ID NO: 2816
W W P C E W A R I G E L C D L E
SEQ ID NO: 2817
K G S S W F P C Y F A Q V G D L C D L Y
SEQ ID NO: 2818
W Y P C W L A Q V G E L C D R E
SEQ ID NO: 2819
R G V Y F P C W L A K V G D L C D S D E F
SEQ ID NO: 2820
R A W W W P C E L A Q V G E L C D L E P S S
SEQ ID NO: 2821
W Y P C W L A K V G E L C D Q E
SEQ ID NO: 2822
R Y V P D C L K A Q V G D L C D F F A W
SEQ ID NO: 2823
W W P C Y L A Q I G E L C D L V
SEQ ID NO: 2824
W Y P C W M A K V G E L C D M E
SEQ ID NO: 2825
Q I T D S G W Y P C W V A K V G E L C D M D
SEQ ID NO: 2826
Y R W W Y P C D I A Q V G E L C D L D Y L L
SEQ ID NO: 2827
C Y M H D C F M A Q V G D L C D R F I S
SEQ ID NO: 2828
W L P C W I A K I G D L C D L D
SEQ ID NO: 2829
S R V W H P C W L A R V G E L C D L E V S D
SEQ ID NO: 2830
W E H E F T W Y P C W I A Q V G E L C D M D
SEQ ID NO: 2831
H R G W V G W Y P C E Y A L P G Q L C D L E
SEQ ID NO: 2832
W Y P C W L A Q L G E L C D Q D W D T P S
SEQ ID NO: 2833
R V R R H S W W P C E I A V V G E L C D L E
SEQ ID NO: 2834
D G W W P C W I A Q V G E L C D L E D P V
SEQ ID NO: 2835
L P F Q D C Y I A Q V G E L C D L P G T
SEQ ID NO: 2836
R W M F D C L F A R V G E L C D I R P W
SEQ ID NO: 2837
G G Y Y D C L I A E V G E L C D M P G Q
SEQ ID NO: 2838
V V C Y A C D I A H V G E L C D L T C R
SEQ ID NO: 2839
T P W Y D C Y I A N V G D L C D F A S A
SEQ ID NO: 2840
L E S L D C F F A R I G D L C E I W D V
SEQ ID NO: 2841
W Q I F D C Y L A Q V G E L C D L Q D T
SEQ ID NO: 2842
G R Y P D C Y I A H V G E L C E F Y D G
SEQ ID NO: 2843
F G D D F C R F I P L F E M C I T D V E
SEQ ID NO: 2844
L V Y Y D C Y M A Q V G E L C D L P S L
SEQ ID NO: 2845
V S R Y D C Y I A K V G E L C D F F E F
SEQ ID NO: 2846
V T V Q D C Y F A R V G D L C D L F S P
SEQ ID NO: 2847
W E W Y D C L M A Q V G E L C D F E G N
SEQ ID NO: 2848
W A F Y D C R N A Q V G D F C D L W E F
SEQ ID NO: 2849
S M D Q D C Y F A Q V G E L C V L F N Q
SEQ ID NO: 2850
G G Y Y D C L I A E V G E L C D I Y G R
SEQ ID NO: 2851
S N W H D C L F A Q V G E L C D L P G S
SEQ ID NO: 2852
Y D C Y I A Q V G E L C D I
SEQ ID NO: 2853
S W L S D L Q D C Y I A Q V G D L C Q I
SEQ ID NO: 2855
R L A S D W W D C Y I A K V G E L C D F
SEQ ID NO: 2856
R L L R D C F L A K V G D L C E L F V W
SEQ ID NO: 2857
Q W F H N C F L A R V G D T C D L F L W
SEQ ID NO: 2858
E L L V D C F K V K V G E L C D L F F G
SEQ ID NO: 2859
R Y V H D C F I A Q V G D L C D L F L H
SEQ ID NO: 2860
K W V H D C F L A K V G D V C D L F V V
SEQ ID NO: 2861
R S L V D C F L V K V G D L C D F F N W
SEQ ID NO: 2862
R Y L Y D C F L A L V G D L C V K F H Q
SEQ ID NO: 2863
A H F Y D C F W A K A G E L C D L W P S
SEQ ID NO: 2864
K W F H D C F L A K V G D L C D L F L W
SEQ ID NO: 2865
W G K L V R D C F L A K V G D L C D L F L W
SEQ ID NO: 2866
T H V H D C F L A K V G D L C D L F I V
SEQ ID NO: 2867
H W V R D C F L A K V G E L C D L F L W
SEQ ID NO: 2868
H G I L D C Y F A K V G E L C E L F D W
SEQ ID NO: 2869
Q F V K D C F L A Q V G D L C E L F L W
SEQ ID NO: 2870
D W L P D C Y F A N V G D L C S L F G S
SEQ ID NO: 2871
H W F L D C F L A N V G D L C D F F G N
SEQ ID NO: 2872
N W L P D C L F A N V G E L C D I F P W
SEQ ID NO: 2873
E I F K D C L F A N V G E L C E I F P S
SEQ ID NO: 2874
N W F H D C F L A R V G D L C D L F L D
SEQ ID NO: 2875
Y S F K D C Y F A K V G E L C E L F L W
SEQ ID NO: 2876
E F F H D C Y V A R V G E L C D L F G W
SEQ ID NO: 2877
S Y L C W L D H W G V I C E E D
SEQ ID NO: 2878
W Y T C M M D W L G V H C E L E
SEQ ID NO: 2879
Q M V W W D C W S T Q E G P V C E L N W T A
SEQ ID NO: 2880
Y W C S V W Q L G S V C E M N N E E T Q
SEQ ID NO: 2881
W T C W L T Q L G Y D C N L D V V D Q S L G
SEQ ID NO: 2882
D G S W Y T C W F T Q L G E W C E Q D D A K
SEQ ID NO: 2883
E F W G W Q C W Q E P L G W S C D L E W M D
SEQ ID NO: 2884
W Y P C W I A R V G E L C D L E
SEQ ID NO: 2885
W Y P C W L A Q V G E L C D L D
SEQ ID NO: 2886
L V D C F K V K V G E L C D L F
SEQ ID NO: 2887
V H D C F I A Q V G D L C D L F
SEQ ID NO: 2888
W P C W A A L G E L C D L D
SEQ ID NO: 2889
W P C W A L G E L C D L D
SEQ ID NO: 2890
W P C W L G E L C D L D
SEQ ID NO: 2891
W Y P C W G E L C D L D

[0390] An IL-2Rβ ligand provided by the present disclosure can comprise a truncated amino acid sequence of any one of SEQ ID NOS: 2661-2853 and 2855-2891.

[0391] An IL-2Rβ ligand provided by the present disclosure can comprise an amino acid sequence selected from any one of SEQ ID NOS: 2661-2853 and 2855-2891, or a truncated amino acid sequence of any one of SEQ ID NOS: 2661-2853 and 2855-2891, wherein the amino acid sequence can independently comprise from 1 to 4 glycines (G) (SEQ ID NO: 9429) on the N-terminus, on the C-terminus, or on both the N- and C-termini.

[0392] An IL-2Rβ ligand provided by the present disclosure can comprise an amino acid sequence selected from any one of SEQ ID NOS: 2661-2853 and 2855-2891, or a truncated amino acid sequence of any one of SEQ ID NOS: 2661-2853 and 2855-2891, wherein the amino acid sequence comprises one or more amino acid substitutions such as from 1 to 5 amino acid substitutions. The amino acid substitutions can comprise conservative amino acid substitutions.

[0393] An IL-2Rβ ligand can comprise an amino acid sequence having an amino acid sequence similarity greater than 60%, greater than 70%, greater than 75%, greater than 80%, greater than 85%, greater than 90%, or greater than 95% to the amino acid sequence of any one of SEQ ID NOS: 2661-2853 and 2855-2891 or to a truncated amino acid sequence of any one of SEQ ID NOS: 2661-2853 and 2855-2891.

[0394] An IL-2Rβ ligand of any one of SEQ ID NOS: 2661-2853 and 2855-2891, a truncated IL-2Rβ ligand of any one of SEQ ID NOS: 2661-2853 and 2855-2891, or a substituted IL-2Rβ ligand of any one of SEQ ID NOS: 2661-2853 and 2855-2891 can bind to the hu-IL-2Rβ subunit with an IC₅₀ of less than 100 μM or less than 10 μM and/or can bind to the cyno-IL-2Rβ subunit with an IC₅₀ of less than 100 μM or less than 10 μM as determined using phage ELISA competition assays.

[0395] An IL-2Rβ ligand of any one of SEQ ID NOS: 2667-2853 and 2855-2891 bound to the hu-IL-2Rβ subunit with an IC₅₀ of less than 100 μM as determined using phage ELISA competition assays.

[0396] An IL-2Rβ ligand provided by the present disclosure can comprise the amino acid sequence of Formula (4) (SEQ ID NO: 2900), an amino acid sequence of Formula (4a) (SEQ ID NO: 2901), an amino acid sequence of Formula (4b) (SEQ ID NO: 2902), an amino acid sequence of Formula (4c) (SEQ ID NO: 2903), an amino acid sequence of Formula (4d) (SEQ ID NO: 2904), an amino acid sequence of Formula (4e) (SEQ ID NO: 2905), or an amino acid sequence of Formula (4f) (SEQ ID NO: 2906):

(4)
-X¹-X²-X³-X⁴-X⁵-C-X⁶-X⁷-X⁸-X⁹-X¹⁰-X¹¹-X¹²-X¹³-C-X¹⁴-
X¹⁵-X¹⁶-X¹⁷-X¹⁸-
(4a)
-X²-X³-X⁴-X⁵-C-X⁶-X⁷-X⁸-X⁹-X¹⁰-X¹¹-X¹²-X¹³-C-X¹⁴-X¹⁵-
X¹⁶-X¹⁷-
(4b)
-X³-X⁴-X⁵-C-X⁶-X⁷-X⁸-X⁹-X¹⁰-X¹¹-X¹²-X¹³-C-X¹⁴-X¹⁵-X¹⁶-
(4c)
-X⁴-X⁵-C-X⁶-X⁷-X⁸-X⁹-X¹⁰-X¹¹-X¹²-X¹³-C-X¹⁴-X¹⁵-
(4d)
-X⁵-C-X⁶-X⁷-X⁸-X⁹-X¹⁰-X¹¹-X¹²-X¹³-C-X¹⁴-
(4e)
-C-X⁶-X⁷-X⁸-X⁹-X¹⁰-X¹¹-X¹²-X¹³-C-
(4f)
-X⁶-X⁷-X⁸-X⁹-X¹⁰-X¹¹-X¹²-X¹³-

[0397] wherein,
[0398] X¹ can be selected from A, D, E, H, K, N, Q, R, and T;
[0399] X² can be selected from F, G, H, I, L, S, W, and Y;
[0400] X³ can be selected from F, I, L, and V;
[0401] X⁴ can be selected from H. K, L, P, R, V, and Y;
[0402] X⁵ can be D;
[0403] X⁶ can be selected from F, L, and Y;
[0404] X⁷ can be selected from F, I, K, L, V, and W;
[0405] X⁸ can be selected from A and V;
[0406] X⁹ can be selected from K, L, N, Q, and R;
[0407] X¹⁰ can be selected from A and V;
[0408] X¹¹ can be G;
[0409] X¹² can be selected from D and E
[0410] X¹³ can be selected from L, T, and V;
[0411] X¹⁴ can be selected from D, E, S, and V;
[0412] X¹⁵ can be selected from F, I, K, and L;
[0413] X¹⁶ can be selected from F and W;
[0414] X¹⁷ can be selected from D, F, G, I, L, N, P, V; and
[0415] X¹⁸ can be selected from D, G, H, N, Q, S V, and W.

[0416] In an IL-2Rβ ligand of Formula (4)-(4e), X² can be W.

[0417] In an IL-2Rβ ligand of Formula (4)-(4e), X⁶ can be F.

[0418] In an IL-2Rβ ligand of Formula (4)-(4e), X⁷ can be selected from F and L

[0419] In an IL-2Rβ ligand of Formula (4)-(4e), X⁸ can be A.

[0420] In an IL-2Rβ ligand of Formula (4)-(4e), X⁹ can be K.

[0421] In an IL-2Rβ ligand of Formula (4)-(4e), X¹⁰ can be V.

[0422] In an IL-2Rβ ligand of Formula (4)-(4e), X¹³ can be L.

[0423] In an IL-2Rβ ligand of Formula (4)-(4e), X¹⁴ can be D.

[0424] In an IL-2Rβ ligand of Formula (4)-(4e), X¹⁵ can be L.

[0425] In an IL-2Rβ ligand of Formula (4)-(4e), X¹⁶ can be F.

[0426] In an IL-2Rβ ligand of Formula (4)-(4e), X¹⁷ can be L.

[0427] In an IL-2Rβ ligand of Formula (4)-(4e), X¹⁸ can be W.

[0428] In an IL-2Rβ ligand of Formula (4)-(4e), the IL-2Rβ ligand can be defined by any combination of X¹ to X¹⁸ as defined in the immediately preceding twelve (12) paragraphs [273]-[286].

[0429] An IL-2Rβ ligand can comprise the amino acid sequence of any one of SEQ ID NO: 2907-2926.

SEQ ID NO: 2907
A F F H D C F F A K A G D L C D F F D D
SEQ ID NO: 2908
D F F H D C F F A K V G D L C D F F F G
SEQ ID NO: 2909
E G F H D C F F A K V G D L C D I F G H
SEQ ID NO: 2910
E H F H D C F F A K V G D L C D I F G N
SEQ ID NO: 2911
E H F H D C F F A K V G D L C D K F G Q
SEQ ID NO: 2912
H I F H D C F I A K V G D L C D L F H S
SEQ ID NO: 2913
H L F H D C F K A K V G D L C D L F I S
SEQ ID NO: 2914
H L F K D C F L A K V G D L C D L F L S
SEQ ID NO: 2915
W G K S I K D C F L A K V G D L C D L F L V
SEQ ID NO: 2916
K S L K D C F L A K V G D L C D L F L V
SEQ ID NO: 2917
K W L L D C F L A L V G D L C D L F L W
SEQ ID NO: 2918
N W L L D C F L A N V G D L C D L F L W
SEQ ID NO: 2919
N W L P D C F L A N V G E L C D L F L W
SEQ ID NO: 2920
Q W L P D C F L A N V G E L C D L F L W
SEQ ID NO: 2921
Q W V R D C L L A N V G E L C E L F L W
SEQ ID NO: 2922
R W V R D C L L A Q V G E L C E L F N W
SEQ ID NO: 2923
R W V V D C Y L A Q V G E L C E L F P W
SEQ ID NO: 2924
R W V V D C Y L A R V G E L C E L F P W
SEQ ID NO: 2925
T Y V Y D C Y V V R V G E I C S L F P W
SEQ ID NO: 2926
Y Y V Y N C Y W V R V G E V C V L W V W

[0430] An IL-2Rβ ligand provided by the present disclosure can comprise a truncated amino acid sequence of any one of SEQ ID NOS: 2900-2926.

[0431] An IL-2Rβ ligand provided by the present disclosure can comprise an amino acid sequence selected from any one of SEQ ID NOS: 2900-2926, or a truncated amino acid sequence of any one of SEQ ID NOS: 2900-2926, wherein the amino acid sequence can independently comprise from 1 to 4 glycines (G) (SEQ ID NO: 9429) on the N-terminus, on the C-terminus, or on both the N- and C-termini.

[0432] An IL-2Rβ ligand provided by the present disclosure can comprise an amino acid sequence selected from any one of SEQ ID NOS: 2900-2926, or a truncated amino acid sequence of any one of SEQ ID NOS: 2900-2926, wherein the amino acid sequence comprises one or more amino acid substitutions such as from 1 to 5 amino acid substitutions. The amino acid substitutions can comprise conservative amino acid substitutions.

[0433] An IL-2Rβ ligand can comprise an amino acid sequence having an amino acid sequence similarity greater than 60%, greater than 70%, greater than 75%, greater than 80%, greater than 85%, greater than 90%, or greater than 95% to the amino acid sequence of any one of SEQ ID NOS: 2900-2926 or to a truncated amino acid sequence of any one of SEQ ID NOS: 2900-2926.

[0434] An IL-2Rβ ligand of any one of SEQ ID NOS: 2900-2926, a truncated IL-2Rβ ligand of any one of SEQ ID NOS: 2900-2926, or a substituted IL-2Rβ ligand of any one of SEQ ID NOS: 2900-2926 can bind to the hu-IL-211P subunit with an IC₅₀ of less than 100 μM or less than 10 μM as determined using phage ELISA competition assays.

[0435] An IL-2Rβ ligand of any one of SEQ ID NOS: 2907-2926 bound to the hu-IL-2Rβ subunit with an IC₅₀ of less than 100 μM as determined using phage ELISA competition assays.

[0436] Certain IL-2Rβ ligands having SEQ ID NOS: 2575-2655, 2667-2853 and 2855-2891, and 2900-2926, bound to the hu-IL-2Rβ subunit with an IC₅₀ of less than 100 μM and to the cyno-IL-2Rβ subunit with an IC₅₀ of less than 100 μM as determined using phage ELISA competition assays.

[0437] An IL-2Rβ ligand can have the amino acid sequence of any of SEQ ID NOS: 911-930, 9301, 9308 and 2930-2941.

SEQ ID NO: 911
G G Y D C R I A Q V G E L C D L G G
SEQ ID NO: 912
G V Q Y K K C W M A Q L G D L C E L D P S G G
SEQ ID NO: 913
G G Y P C W M A Q L G E L C D L G G R R
SEQ ID NO: 9301
G G W Y P C W M A Q L G E L C D L D G G
SEQ ID NO: 915
G G W Y P C W M A Q L G E L C D L D G G R R
SEQ ID NO: 916
G G Y P C H M A Q L G E L C D L W S W G D I G G R
R
SEQ ID NO: 917
F Y P C W T A L L G E L C D L E P G P P A M G G
SEQ ID NO: 918
W R R W Y P C W V A Q V G E L C D L E I E A G G
SEQ ID NO: 919
R Q R W Y P C W M A R L G E L C D L D E P T G G
SEQ ID NO: 920
W Y P C W M A Q L G D L C D L E K P V T E R G G
SEQ ID NO: 9308
G G W Y P C W M A Q L G E L C D L D
SEQ ID NO: 921
G G F Y P C W T A L L G E L C D L E P G P P A M G
G
SEQ ID NO: 922
G G W G T T W R W Y P C W M A Q L G E L C D L E G
G
SEQ ID NO: 923
G G D V L G D R W Y P C W I A K G E L C D L D G G
SEQ ID NO: 924
G G W P C W I A Q L G E L C D L D G G
SEQ ID NO: 925
G G W Y P C W L A K L G E L C D L D G G
SEQ ID NO: 926
G G W Y P C W M A Q L G D L C D L E K P V T E R G
G
SEQ ID NO: 927
G G W R R W Y P C W V A Q V G E L C D L E I E A G
G
SEQ ID NO: 928
G G R Q R W Y P C W M A R L G E L C D L D E P T G
G
SEQ ID NO: 929
G G V Q Y K K C W M A Q L G D L C E L D P S G G
SEQ ID NO: 930
G G Y P C H M A Q L G E L C D L W S W G D I G G
SEQ ID NO: 2930
G G W Y P C W I A R V G E L C D L E E G P V N R
SEQ ID NO: 2931
G G A V E F Y P C W L A R I G E L C D L V E P
SEQ ID NO: 2932
G G W Y P C W I A R V G E L C D M E
SEQ ID NO: 2933
G G E W F H D C F L A K V G D L C D L F L G G E W
SEQ ID NO: 2934
G G R Y V H D C F I A Q V G D L C D L F L H
SEQ ID NO: 2935
G G R S L V D C F L V K V G D L C D F F N W
SEQ ID NO: 2936
G G W Y P C W I A R V G E L C D L E
SEQ ID NO: 2937
G G W Y P C W L A Q V G E L C D L D
SEQ ID NO: 2938
G G L V D C F K V K V G E L C D L F
SEQ ID NO: 2939
G G W Y S C W M A Q L G E L C D L D
SEQ ID NO: 2940
G G R Y L Y D C F L A L V G D L C V K F H Q
SEQ ID NO: 2941
G G E W F H D C F L A K V G D L C D L F L G G E W
G G

[0438] An IL-2Rβ ligand provided by the present disclosure can comprise a truncated amino acid sequence of any one of SEQ ID NOS: 911-930, 9301, 9308 and 2930-2941.

[0439] An IL-2Rβ ligand provided by the present disclosure can comprise an amino acid sequence selected from any one of SEQ ID NOS: 911-930, 9301, 9308 and 2930-2941, or a truncated amino acid sequence of any one of SEQ ID NOS: 911-930, 9301, 9308 and 2930-2941, wherein the amino acid sequence can independently comprise from 1 to 4 glycines (G) (SEQ ID NO: 9429) on the N-terminus, on the C-terminus, or on both the N- and C-termini.

[0440] An IL-2Rβ ligand provided by the present disclosure can comprise an amino acid sequence selected from any one of SEQ ID NOS: 911-930, 9301, 9308 and 2930-2941, or a truncated amino acid sequence of any one of SEQ ID NOS: 911-930, 9301, 9308 and 2930-2941, wherein the amino acid sequence comprises one or more amino acid substitutions such as from 1 to 5 amino acid substitutions. The amino acid substitutions can comprise conservative amino acid substitutions.

[0441] An IL-2Rβ ligand can comprise an amino acid sequence having an amino acid sequence similarity greater than 60%, greater than 70%, greater than 75%, greater than 80%, greater than 85%, greater than 90%, or greater than 95% to the amino acid sequence of any one of SEQ ID NOS: 911-930, 9301, 9308 and 2930-2941 or to a truncated amino acid sequence of any one of SEQ ID NOS: 911-930, 9301, 9308 and 2930-2941.

[0442] An IL-2Rβ ligand of any one of SEQ ID NOS: 911-930, 9301, 9308 and 2930-2941, a truncated IL-2Rβ ligand of any one of SEQ ID NOS: 911-930, 9301, 9308 and 2930-2941, or a substituted IL-2Rβ ligand of any one of SEQ ID NOS: 911-930, 9301, 9308 and 2930-2941 can bind to the hu-IL-2Rβ subunit with an IC₅₀ of less than 100 μM or less than 10 μM as determined using phage ELISA competition assays.

[0443] An IL-2Rβ ligand of any one of SEQ ID NOS: 2907-2926 bound to the hu-IL-2Rβ subunit with an IC₅₀ of less than 100 μM as determined using phage ELISA competition assays.

[0444] An IL-2Rβ ligand can be selected from any one of IL-2Rβ ligands (BL1)-(BL12) and can have SEQ ID NO: 612, 664, 671, 865, 856, 858, 864, 869, 870, 874, 875, or 901, as shown in Table 1.

TABLE 1
IL-2Rβ Ligands.

| | | |
|---|---|---|
| (BL1) | SEQ ID NO: 671 | V Q Y K K C W M A Q L |
| | | G D L C E L D P S |
| (BL2) | SEQ ID NO: 664 | Y P C H M A Q L G E L |
| | | C D L W S W G D I |
| (BL3) | SEQ ID NO: 612 | Y P C W M A Q L G E L |
| | | C D L |
| (BL4) | SEQ ID NO: 865 | W Y P C W M A Q L G E |
| | | L C D L D |
| (BL5) | SEQ ID NO: 870 | W G T T W R W Y P C W |
| | | M A Q L G E L C D L E |
| (BL6) | SEQ ID NO: 869 | F Y P C W T A L L G E |
| | | L C D L E P G P P A M |
| (BL7) | SEQ ID NO: 856 | W R R W Y P C W V A Q |
| | | V G E L C D L E I E A |
| (BL8) | SEQ ID NO: 858 | R Q R W Y P C W M A R |
| | | L G E L C D L D E P T |
| (BL9) | SEQ ID NO: 864 | D V L G D R W Y P C W |
| | | I A K L G E L C D L D |
| (BL10) | SEQ ID NO: 901 | W Y P C W M A Q L G D |
| | | L C D L E K P V T E R |
| (BL11) | SEQ ID NO: 874 | W Y P C W I A Q L G E |
| | | L C D L D |
| (BL12) | SEQ ID NO: 875 | W Y P C W L A K L G E |
| | | L C D L D |

[0445] An IL-2Rβ ligand can comprise an amino acid sequence having an amino acid sequence similarity greater than 60%, greater than 70%, greater than 75%, greater than 80%, greater than 85%, greater than 90%, or greater than 95% to the amino acid sequence of any one of SEQ ID NOS: 612, 664, 671, 865, 856, 858, 864, 869, 870, 874, 875, and 901.

[0446] An IL-2Rβ ligand provided by the present disclosure can comprise a truncated amino acid sequence of any one of SEQ ID NOS: 612, 664, 671, 865, 856, 858, 864, 869, 870, 874, 875, and 901.

[0447] An IL-2Rβ ligand provided by the present disclosure can comprise an amino acid sequence selected from any one of SEQ ID NOS: 612, 664, 671, 865, 856, 858, 864, 869, 870, 874, 875, and 901, or a truncated amino acid sequence of any one of SEQ ID NOS: 612, 664, 671, 865, 856, 858, 864, 869, 870, 874, 875, and 901, wherein the amino acid sequence can independently comprise from 1 to 4 glycines (G) (SEQ ID NO: 9429) on the N-terminus, on the C-terminus, or on both the N- and C-termini.

[0448] An IL-2Rβ ligand provided by the present disclosure can comprise an amino acid sequence selected from any one of SEQ ID NOS: 612, 664, 671, 865, 856, 858, 864, 869, 870, 874, 875, and 901, or a truncated amino acid sequence of any one of SEQ ID NOS: 612, 664, 671, 865, 856, 858, 864, 869, 870, 874, 875, and 901, wherein the amino acid sequence comprises one or more amino acid substitutions such as from 1 to 5 amino acid substitutions. The amino acid substitutions can comprise conservative amino acid substitutions.

[0449] An IL-2Rβ ligand can comprise an amino acid sequence having an amino acid sequence similarity greater than 60%, greater than 70%, greater than 75%, greater than 80%, greater than 85%, greater than 90%, or greater than 95% to the amino acid sequence of any one of SEQ ID NOS: 612, 664, 671, 865, 856, 858, 864, 869, 870, 874, 875, and 901 or to a truncated amino acid sequence of any one of SEQ ID NOS: 612, 664, 671, 865, 856, 858, 864, 869, 870, 874, 875, and 901.

[0450] An IL-2Rβ ligand of any one of SEQ ID NOS: 612, 664, 671, 865, 856, 858, 864, 869, 870, 874, 875, and 901 can bind to the hu-IL-2Rβ subunit with an IC₅₀ of less than 10 μM as determined using phage ELISA competition assays.

[0451] An IL-2Rβ ligand of any one of SEQ ID NOS: 612, 664, 671, 865, 856, 858, 864, 869, 870, 874, 875, and 901, a truncated IL-2Rβ ligand of any one of SEQ ID NOS: 612, 664, 671, 865, 856, 858, 864, 869, 870, 874, 875, and 901, or a substituted IL-2Rβ ligand of any one of SEQ ID NOS: 612, 664, 671, 865, 856, 858, 864, 869, 870, 874, 875, and 901 can bind to the hu-IL-2Rβ subunit with an IC₅₀ of less than 100 μM or less than 10 μM as determined using phage ELISA competition assays.

[0452] An IL-2Rβ ligand can comprise an IL-2Rβ ligand of SEQ ID NO: 3102, a truncated IL-2Rβ ligand having SEQ ID NO: 3102, an IL-2Rβ ligand based on SEQ ID NO: 3102 having from 1 to 5 conservative amino acid substitutions, an IL-2Rβ ligand having greater than 70% sequence identity to SEQ ID NO: 3102, an IL-2Rβ ligand of SEQ ID NO: 3102 having from 1 to 5 glycines on the N-terminus and or the C-terminus, or a combination of any of the foregoing.

[0453] An IL-2Rβ ligand can comprise an amino acid sequence selected from any one of SEQ IS NOS: 2858 and 3100-3121.

SEQ ID NO: 3100
E L L V D C F K V K V G E L C D L F F G G G
SEQ ID NO: 3101
E L L V D C F K V K V G E L C D L F F G G
SEQ ID NO: 2858
E L L V D C F K V K V G E L C D L F F G
SEQ ID NO: 3102
E L L V D C F K V K V G E L C D L F F
SEQ ID NO: 3103
E L L V D C F K V K V G E L C D L F
SEQ ID NO: 3104
E L L V D C F K V K V G E L C D L
SEQ ID NO: 3105
E L L V D C F K V K V G E L C D
SEQ ID NO: 3106
G G G E L L V D C F K V K V G E L C D L F F
SEQ ID NO: 3107
G G E L L V D C F K V K V G E L C D L F F
SEQ ID NO: 3108
G E L L V D C F K V K V G E L C D L F F
SEQ ID NO: 3109
E L L V D C F K V K V G E L C D L F F
SEQ ID NO: 3110
L L V D C F K V K V G E L C D L F F
SEQ ID NO: 3111
L V D C F K V K V G E L C D L F F
SEQ ID NO: 3112
V D C F K V K V G E L C D L F F
SEQ ID NO: 3113
G E L L V D C F K V K V G E L C D L F F G
SEQ ID NO: 3114
G G E L L V D C F K V K V G E L C D L F F G
SEQ ID NO: 3115
G G G E L L V D C F K V K V G E L C D L F F G
SEQ ID NO: 3116
G E L L V D C F K V K V G E L C D L F F G G
SEQ ID NO: 3117
G G E L L V D C F K V K V G E L C D L F F G G
SEQ ID NO: 3118
G G G E L L V D C F K V K V G E L C D L F F G G G
SEQ ID NO: 3119
G E L L V D C F K V K V G E L C D L F F G G G
SEQ ID NO: 3120
G G E L L V D C F K V K V G E L C D L F F G G G
SEQ ID NO: 3121
G G G E L L V D C F K V K V G E L C D L F F G G G

[0454] An IL-2Rβ ligand provided by the present disclosure can comprise a truncated amino acid sequence of any one of SEQ ID NOS: 2858 and 3100-3121.

[0455] An IL-2Rβ ligand provided by the present disclosure can comprise an amino acid sequence selected from any one of SEQ ID NOS: 2858 and 3100-3121, or a truncated amino acid sequence of any one of SEQ ID NOS: 2661-2891, wherein the amino acid sequence can independently comprise from 1 to 4 glycines (G) (SEQ ID NO: 9429) on the N-terminus, on the C-terminus, or on both the N- and C-termini.

[0456] An IL-2Rβ ligand provided by the present disclosure can comprise an amino acid sequence selected from any one of SEQ ID NOS: 2858 and 3100-3121, or a truncated amino acid sequence of any one of SEQ ID NOS: 2858 and 3100-3121, wherein the amino acid sequence comprises one or more amino acid substitutions such as from 1 to 5 amino acid substitutions. The amino acid substitutions can comprise conservative amino acid substitutions.

[0457] An IL-2Rβ ligand can comprise an amino acid sequence having an amino acid sequence similarity greater than 60%, greater than 70%, greater than 75%, greater than 80%, greater than 85%, greater than 90%, or greater than 95% to the amino acid sequence of any one of SEQ ID NOS: 2858 and 3100-3121 or to a truncated amino acid sequence of any one of SEQ ID NOS: 2858 and 3100-3121.

[0458] An IL-2Rβ ligand can have the amino acid sequence of any one of SEQ ID NOS: 2858 and 3100-3121, a truncated IL-2Rβ ligand of any one of SEQ ID NOS: 2858 and 3100-3121, or a substituted IL-2Rβ ligand of any one of SEQ ID NOS: 2858 and 3100-3121 can bind to the hu-IL-2Rβ subunit with an IC₅₀ of less than 100 μM or less than 10 μM and to the cyno-IL-2Rβ subunit with an IC₅₀ of less than 100 μM or less than 10 μM as determined using phage ELISA competition assays.

[0459] An IL-2Rβ ligand of any one of SEQ ID NOS: 2858 and 3100-3121 can bind to the hu-IL-2Rβ subunit with an IC₅₀ of less than 100 μM as determined using phage ELISA competition assays.

[0460] An IL-2Rβ ligand can be a truncated ligand of SEQ ID NO: 3120 and can have an amino acid sequence, for example, of any one of SEQ ID NOS: 3107, 3114, and 3122-3128.

SEQ ID NO: 3114
G G E L L V D C F K V K V G E L C D L F F G
SEQ ID NO: 3107
G G E L L V D C F K V K V G E L C D L F F
SEQ ID NO: 3122
G G E L L V D C F K V K V G E L C D L F
SEQ ID NO: 3123
G G E L L V D C F K V K V G E L C D L
SEQ ID NO: 3124
E L L V D C F K V K V G E L C D L F F G G G
SEQ ID NO: 3125
L L V D C F K V K V G E L C D L F F G G G
SEQ ID NO: 3126
L V D C F K V K V G E L C D L F F G G G
SEQ ID NO: 3127
V D C F K V K V G E L C D L F F G G G
SEQ ID NO: 3128
G G E L L V D C F R V R V G E L C D L F F G G G

[0461] An IL-2Rβ ligand can comprise the IL-2Rβ ligand of SEQ ID NO: 2859, a truncated IL-2Rβ ligand having SEQ ID NO: 2859, an IL-2Rβ ligand based on SEQ ID NO: 2859 having from 1 to 5 conservative amino acid substitutions, an IL-2Rβ ligand having greater than 70% sequence identity to SEQ ID NO: 2859, an IL-2Rβ ligand of SEQ ID NO: 2859 having from 1 to 5 glycines on the N-terminus and or the C-terminus, or a combination of any of the foregoing.

[0462] An IL-2Rβ ligand can comprise an amino acid sequence selected from any one of SEQ ID NOS: 2859 and 3130-3151.

SEQ ID NO: 3130
R Y V H D C F I A Q V G D L C D L F L H G G G
SEQ ID NO: 3131
R Y V H D C F I A Q V G D L C D L F L H G G
SEQ ID NO: 3132
R Y V H D C F I A Q V G D L C D L F L H G
SEQ ID NO: 2859
R Y V H D C F I A Q V G D L C D L F L H
SEQ ID NO: 3133
R Y V H D C F I A Q V G D L C D L F L
SEQ ID NO: 3134
R Y V H D C F I A Q V G D L C D L F
SEQ ID NO: 3135
R Y V H D C F I A Q V G D L C D L
SEQ ID NO: 3136
G G G R Y V H D C F I A Q V G D L C D L F L H
SEQ ID NO: 3137
G G R Y V H D C F I A Q V G D L C D L F L H
SEQ ID NO: 3138
G R Y V H D C F I A Q V G D L C D L F L H
SEQ ID NO: 3139
R Y V H D C F I A Q V G D L C D L F L H
SEQ ID NO: 3140
Y V H D C F I A Q V G D L C D L F L H
SEQ ID NO: 3141
V H D C F I A Q V G D L C D L F L H
SEQ ID NO: 3142
H D C F I A Q V G D L C D L F L H
SEQ ID NO: 3143
G R Y V H D C F I A Q V G D L C D L F L H G
SEQ ID NO: 3144
G G R Y V H D C F I A Q V G D L C D L F L H G
SEQ ID NO: 3145
G G G R Y V H D C F I A Q V G D L C D L F L H G
SEQ ID NO: 3146
G R Y V H D C F I A Q V G D L C D L F L H G G
SEQ ID NO: 3147
G G R Y V H D C F I A Q V G D L C D L F L H G G
SEQ ID NO: 3148
G G G R Y V H D C F I A Q V G D L C D L F L H G G G
SEQ ID NO: 3149
G R Y V H D C F I A Q V G D L C D L F L H G G G
SEQ ID NO: 3150
G G R Y V H D C F I A Q V G D L C D L F L H G G G
SEQ ID NO: 3151
G G G R Y V H D C F I A Q V G D L C D L F L H G G G

[0463] An IL-2Rβ ligand provided by the present disclosure can comprise a truncated amino acid sequence of any one of SEQ ID NOS: 2859 and 3130-3151.

[0464] An IL-2Rβ ligand provided by the present disclosure can comprise an amino acid sequence selected from any one of SEQ ID NOS: 2859 and 3130-3151, or a truncated amino acid sequence of any one of SEQ ID NOS: 2859 and 3130-3151, wherein the amino acid sequence can independently comprise from 1 to 4 glycines (G) (SEQ ID NO: 9429) on the N-terminus, on the C-terminus, or on both the N- and C-termini.

[0465] An IL-2Rβ ligand provided by the present disclosure can comprise an amino acid sequence selected from any one of SEQ ID NOS: 2859 and 3130-3151, or a truncated amino acid sequence of any one of SEQ ID NOS: 2859 and 3130-3151, wherein the amino acid sequence comprises one or more amino acid substitutions such as from 1 to 5 amino acid substitutions. The amino acid substitutions can comprise conservative amino acid substitutions.

[0466] An IL-2Rβ ligand can comprise an amino acid sequence having an amino acid sequence similarity greater than 60%, greater than 70%, greater than 75%, greater than 80%, greater than 85%, greater than 90%, or greater than 95% to the amino acid sequence of any one of SEQ ID NOS: 2859 and 3130-3151 or to a truncated amino acid sequence of any one of SEQ ID NOS: 2859 and 3130-3151.

[0467] An IL-2Rβ ligand of any one of SEQ ID NOS: 2859 and 3130-3151, a truncated IL-2Rβ ligand of any one of SEQ ID NOS: 2859 and 3130-3151, or a substituted IL-2Rβ ligand of any one of SEQ ID NOS: 2859 and 3130-3151 can bind to the hu-IL-2Rβ subunit with an IC₅₀ of less than 100 μM or less than 10 μM and to the cyno-IL-2Rβ subunit with an IC₅₀ of less than 100 μM or less than 10 μM as determined using phage ELISA competition assays.

[0468] An IL-2Rβ ligand of any one of SEQ ID NOS: 2859 and 3130-3151 can bind to the hu-IL-2Rβ subunit with an IC₅₀ of less than 100 μM as determined using phage ELISA competition assays.

[0469] An IL-2Rβ ligand provided by the present disclosure can comprise an amino acid sequence of any one of SEQ ID NO: 3147 in which from 1 to 3, such as 1, 2, or 3, amino acids are substituted with an alanine.

[0470] For example, an IL-2Rβ ligand having SEQ ID NO: 3147 can be substituted with one (1) alanine and can have the amino acid sequence of any one of SEQ ID NOS: 3170-3186.

SEQ ID NO: 3169
G G R Y V H D C A I A Q V G D L C D L F L H G G
SEQ ID NO: 3170
G G R Y V H D C F A A Q V G D L C D L F L H G G
SEQ ID NO: 3171
G G R Y V H D C F I G Q V G D L C D L F L H G G
SEQ ID NO: 3172
G G R Y V H D C F I A A V G D L C D L F L H G G
SEQ ID NO: 3173
G G R Y V H D C F I A Q A G D L C D L F L H G G
SEQ ID NO: 3174
G G R Y V H D C F I A Q V A D L C D L F L H G G
SEQ ID NO: 3175
G G R Y V H D C F I A Q V G A L C D L F L H G G
SEQ ID NO: 3176
G G R Y V H D C F I A Q V G D A C D L F L H G G
SEQ ID NO: 3177
G G A Y V H D C F I A Q V G D L C D L F L H G G
SEQ ID NO: 3178
G G R A V H D C F I A Q V G D L C D L F L H G G
SEQ ID NO: 3179
G G R Y A H D C F I A Q V G D L C D L F L H G G
SEQ ID NO: 3180
G G R Y V A D C F I A Q V G D L C D L F L H G G
SEQ ID NO: 3181
G G R Y V H A C F I A Q V G D L C D L F L H G G
SEQ ID NO: 3182
G G R Y V H D C F I A Q V G D L C D L F L A G G
SEQ ID NO: 3183
G G R Y V H D C F I A Q V G D L C D L F A H G G
SEQ ID NO: 3184
G G R Y V H D C F I A Q V G D L C D L A L H G G
SEQ ID NO: 3185
G G R Y V H D C F I A Q V G D L C D A F L H G G
SEQ ID NO: 3186
G G R Y V H D C F I A Q V G D L C A L F L H G G

[0471] For example, an IL-2Rβ ligand having SEQ ID NO: 2859 can be substituted with two (2) alanine and can have the amino acid sequence of any one of SEQ ID NOS: 31610-3166.

[0472] An IL-2Rβ ligand provided by the present disclosure can comprise, for example, from 1 to 5 alanine substitutions. For example, an IL-2Rβ ligand of SEQ ID NOS: 3102 and 2859 can have from 1 to 5 alanine substitutions. For example, an IL-2Rβ ligand based on SEQ ID NO: 2859 can have alanine substitutions at amino acid positions indicted by the X in SEQ ID NO: 3160. An IL-2Rβ ligand based on SEQ ID NO: 2859 include IL-2Rβ ligands having amino acid SEQ ID NOS: 3161-3166.

SEQ ID NO: 2859
R Y V H D C F I A Q V G D L C D L F L H
SEQ ID NO: 3160
X Y V H D C F X A X V G D L C D X F X X
SEQ ID NO: 3161
R Y V H D C F A A Q V G D L C D L F L H
SEQ ID NO: 3162
R Y V H D C F I A Q V G D L C D L F L A
SEQ ID NO: 3163
R Y V H D C F I A Q V G D L C D A F L H
SEQ ID NO: 3164
R Y V H D C F I A A V G D L C D L F L H
SEQ ID NO: 3165
R Y V H D C F I A Q V G D L C D L F A H
SEQ ID NO: 3166
A Y V H D C F I A Q V G D L C D L F L H

[0473] An IL-2Rβ ligand provided by the present disclosure can bind to both the hu-IL-2Rβ subunit and to the cyno-IL-2Rβ subunit with an IC50 less than 100 μM, less than 10 μM, less than 1 μm, less than 100 nM, less than 10 nM, or less than 1 nM.

[0474] An IL-2Rβ ligand provided by the present disclosure that binds to both the hu-IL-2Rβ subunit and to the cyno-IL-2Rβ subunit with an IC50 less than 100 μM is referred to as a hu/cyno-IL-2Rβ ligand.

[0475] Examples of hu/cyno-IL-2Rβ ligands include peptides having an amino acid sequence of any one of SEQ ID NOS: 2661-2891, 2900-2986, 3100-3128, 3130-3151, 3160-3166, 3170-3186, and 3200-3207.

[0476] Certain IL-2Rβ ligands provided by the present disclosure can bind to a specific binding site on the hu-IL-2Rβ subunit that is different than the hu-IL-2Rβ binding site on the hu-IL-2Rβ subunit to which IL-2 binds.

[0477] These IL-2Rβ ligands do not compete for binding to the specific hu-IL-2 binding site with IL-2, have no detectable binding to the hu-IL-2Rγc subunit, and bind to the hu-IL-2Rβ subunit with an IC₅₀ of less than 100 μM or less than 10 μM.

[0478] The specific binding site on the hu-IL-2Rβ subunit can be characterized by at least the following properties: (1) a group of IL-2Rβ ligands bind to a specific binding site on the hu-IL-2Rβ subunit with an IC₅₀ of less than 100 μM or less than 10 μM; (2) each IL-2Rβ ligands within the group competitively binds to the specific binding site on the hu-IL-2Rβ subunit with each of the other IL-2Rβ ligands within the group; (3) a peptide having the amino acid sequence of SEQ ID NO: 1044 does not compete for binding to a specific binding site on the IL-2Rβ subunit with the peptides within the group of IL-2Rβ ligands; and (4) IL-2Rβ ligands having SEQ ID NOS: 58, 169, and 1042 do not bind competitively with IL-2 binding to IL-2Rβ, indicating that this IL-2Rβ ligand binding site is distinct from that of IL-2.

[0479] The group of IL-2Rβ ligands comprises at least the IL-2Rβ ligands having the amino acid sequence of any one of SEQ ID NOS: 58, 83, 142, 169, 170, and 663.

[0480] An IL-2Rγc ligand having the amino acid sequence of SEQ ID NO: 224 does not compete for binding to the specific binding site with the group of IL-2Rβ ligands.

[0481] This specific binding site on the hu-IL-2Rβ subunit to which the group of IL-2Rβ ligands bind can be characterized using competition binding assays as described, for example, in Example 27 and 28.

[0482] IL-2Rβ binding compounds provided by the present disclosure including IL-2Rβ ligands, IL-2Rβγc ligands, and IL-2Rβγc constructs bind to the specific binding site of hu-IL-2Rβ with an IC50 less than 100 μM such as less than 10 μM, less than 1 μM, or less than 0.1 μM.

[0483] IL-2Rβ ligands having SEQ ID NOS: 805-903, 911-930, 2575-2655, 2661-2891, 2900-2986, 2929-2941, 3100-3128, 3130-3151, 3160-3166, 3170-3186, and 3200-3207 bind to the specific binding site of hu-IL-2Rβ with an IC50 less than 100 μM such as less than 10 μM, less than 1 μM, or less than 0.1 μM.

[0484] An IL-2Rβ ligand provided by the present disclosure can be a pH-biased IL-2Rβ ligand.

[0485] pH-Biased IL-2Rβ ligands can bind to the IL-2Rβ subunit with an IC₅₀ at pH 6 that is at least 10% less than the IC₅₀ for binding to the IL-2Rβ subunit at pH 7.5.

[0486] For example, the IC₅₀ for binding of a human IL-2Rβ ligand at pH 6.0 can be 0.5 μM, and the IC₅₀ for binding of the same IL-2Rβ ligand at pH 7.5 can be 1 μM. A pH-biased IL-2Rβ ligand can bind to the IL-2Rβ subunit at pH 6.0 with an IC₅₀ that is at least 10% less than the IC₅₀ for binding to the human IL-2Rβ subunit at pH 7.5, at least 25% less, at least 50% less, at least 100% less, or at least 200% less than the IC₅₀ for binding to the human IL-2Rβ subunit at pH 7.5.

[0487] A pH-biased binding affinity (IC₅₀) can be determined as described in Examples 24-27.

[0488] A pH-biased IL-2Rβ ligand can comprise, for example, from 5 to 30 amino acids.

[0489] A pH-biased IL-2Rβ ligand can bind to the human IL-2Rβ subunit at pH 6.0, for example, with an IC₅₀ from 1 pM to 100 μM and can bind to the human IL-2Rβ subunit with an IC₅₀ greater than 100 μM at pH 7.5.

[0490] A pH-biased IL-2Rβ ligand can bind to the human IL-2Rβ subunit at pH 6.0, for example, with an IC₅₀ from 0.1 μM to 50 μM and can bind to the human IL-2Rβ subunit with an IC₅₀ greater than 100 μM at pH 7.5.

[0491] A pH-biased IL-2Rβ ligand can bind to the human IL-2Rβ subunit at pH 6.0, for example, with an IC₅₀ of less than 100 μM and can bind to the human IL-2Rβ subunit, for example, with an IC₅₀ greater than 100 μM at pH 7.5.

[0492] A pH-biased IL-2Rβ ligand can bind to a mammalian IL-2Rβ subunit at pH 6.0, for example, with an IC₅₀ of less than 100 μM and can bind to the human IL-2Rβ subunit with an IC₅₀ greater than 100 μM at pH 7.5.

[0493] pH-biased IL-2Rβ ligands can be identified using the methods described in Examples 23 and 24. These methods, based on acidic-biased affinity selection, have been used to identify IL-2Rβ ligands having increased binding affinity at a pH less than pH 6.5 commensurate with a solid tumor microenvironment and having decreased binding affinity at a pH greater than pH 7.0 commensurate with that of normal tissue.

[0494] An IL-2Rγc ligand can include an IL-2Rγc ligand disclosed in U.S. Application Publication No. 2020/0040036 A1, which is incorporated by reference in its entirety.

[0495] An IL-2Rγc ligand provided by the present disclosure can bind to the human IL-2Rγc subunit with an IC₅₀ of less than 100 μM, less than 10 μM, less than 1 μM, less than 0.1 μM, or less than 0.01 μM.

[0496] An IL-2Rγc ligand provided by the present disclosure can bind to the human IL-2Rγc subunit with an IC₅₀ from 1 pM to 100 μM, from 10 pM to 10 μM, from 100 pM to 1 μM, from, 0.001 μM to 1 μM, or from 0.01 μM to 1 μM.

[0497] An IL-2Rγc ligand provided by the present disclosure can bind to a mammalian IL-2Rγc subunit with an IC₅₀, for example, of less than 100 μM, less than 10 μM, less than 1 μM, less than 0.1 μM, or less than 0.01 μM.

[0498] An IL-2Rγc ligand provided by the present disclosure can bind to a mammalian IL-2Rγc subunit with an IC₅₀, for example, from 1 pM to 100 μM, from 10 pM to 10 μM, from 100 pM to 1 μM, from, 0.001 μM to 1 μM, or from 0.01 μM to 1 μM.

[0499] An IL-2Rγc ligand can comprise the amino acid sequence of Formula (5) (SEQ ID NO: 944), Formula (5a) (SEQ ID NO: 945), Formula (5b) (SEQ ID NO: 946), Formula (5c) (SEQ ID NO: 947), Formula (5d) (SEQ ID NO: 948), and/or Formula (5e) (SEQ ID NO: 949):

| | |
|---|---|
| -X¹⁷¹-X¹⁷²-X¹⁷³-X¹⁷⁴-X¹⁷⁵-C-X¹⁷⁶-X¹⁷⁷-X¹⁷⁸-X¹⁷⁹-X¹⁸⁰- | (5) |
| X¹⁸¹-X¹⁸²-X¹⁸³-C-X¹⁸⁴-X¹⁸⁵-X¹⁸⁶-X¹⁸⁷-X¹⁸⁸- | |
| -X¹⁷²-X¹⁷³-X¹⁷⁴-X¹⁷⁵-C-X¹⁷⁶-X¹⁷⁷-X¹⁷⁸-X¹⁷⁹-X¹⁸⁰-X¹⁸¹- | (5a) |
| X¹⁸²-X¹⁸³-C-X¹⁸⁴-X¹⁸⁵-X¹⁸⁶-X¹⁸⁷- | |
| -X¹⁷³-X¹⁷⁴-X¹⁷⁵-C-X¹⁷⁶-X¹⁷⁷-X¹⁷⁸-X¹⁷⁹-X¹⁸⁰-X¹⁸¹-X¹⁸²- | (5b) |
| X¹⁸³-C-X¹⁸⁴-X¹⁸⁵-X¹⁸⁶- | |
| -X¹⁷⁴-X¹⁷⁵-C-X¹⁷⁶-X¹⁷⁷-X¹⁷⁸-X¹⁷⁹-X¹⁸⁰-X¹⁸¹-X¹⁸²-X¹⁸³- | (5c) |
| C-X¹⁸⁴-X¹⁸⁵- | |
| -X¹⁷⁵-C-X¹⁷⁶-X¹⁷⁷-X¹⁷⁸-X¹⁷⁹-X¹⁸⁰-X¹⁸¹-X¹⁸²-X¹⁸³-C- | (5c) |
| X¹⁸⁴-X¹⁸⁵- | |
| -X¹⁷⁵-C-X¹⁷⁶-X¹⁷⁷-X¹⁷⁸-X¹⁷⁹-X¹⁸⁰-X¹⁸¹-X¹⁸²-X¹⁸³-C- | (5d) |
| X¹⁸⁴- | |
| -C-X¹⁷⁶-X¹⁷⁷-X¹⁷⁸-X¹⁷⁹-X¹⁸⁰-X¹⁸¹-X¹⁸²-X¹⁸³-C- | (5e) |

wherein, X¹⁷¹ can be selected from an amino acid comprising a basic side chain; X¹⁷² can be selected from an amino acid comprising a hydroxyl-containing side chain; X¹⁷³ can be selected from an amino acid comprising an acidic side chain or a large hydrophobic side chain; X¹⁷⁴ can be selected from an amino acid comprising a large hydrophobic side chain; X¹⁷⁵ can be selected from an amino acid comprising an acidic side chain or a large hydrophobic side chain; X¹⁷⁶ can be selected from an amino acid comprising an acidic side chain or a polar/neutral side chain; X¹⁷⁷ can be selected from an amino acid comprising an acidic side chain; X¹⁷⁸ can be selected from an amino acid comprising a large hydrophobic side chain or an aromatic side chain; X¹⁷⁹ can be selected from an amino acid comprising an acidic side chain or a polar/neutral side chain; X¹⁸⁰ can be G; X¹⁸¹ can be V; X¹⁸² can be E; X¹⁸³ can be L; X¹⁸⁴ can be W; X¹⁸⁵ can be selected from an amino acid comprising a large hydrophobic side chain; X¹⁸⁶ can be E; X¹⁸⁷ can be selected from an amino acid; and X¹⁸⁸ can be selected from an amino acid comprising an acidic side chain.

[0500] In IL-2Rγc ligands of Formula (5), (5a), (5b), (5c), (5d), and/or (5e), X¹⁷¹ can be selected from H, K, and R; X¹⁷² can be selected from S, T, and Y; X¹⁷³ can be selected from D, E, F, I, L, M, V, W, and Y; X¹⁷⁴ can be selected from F, I, L, M, V, W, and Y; X¹⁷⁵ can be selected from D, E, F, I, L, M, V, W, and Y; X¹⁷⁶ can be selected from D, E, H, N, Q, S, T, and Y; X¹⁷⁷ can be selected from D and E; X¹⁷⁸ can be selected from F, H, I, L, M, V, W, and Y; X¹⁷⁹ can be selected from D, E, H, N, Q, S, T, and Y; X¹⁸⁰ can be G; X¹⁸¹ can be V; X¹⁸² can be E; X¹⁸³ can be L; X¹⁸⁴ can be W; X¹⁸⁵ can be selected from F, I, L, M, V, W, Y, H, N, Q, S, and T; X¹⁸⁶ can be E; X¹⁸⁷ can be selected from an amino acid; and X¹⁸⁸ can be selected from D and E.

[0501] In IL-2Rγc ligands of Formula (5), (5a), (5b), (5c), (5d), and/or (5e), X¹⁷¹ can be selected from D, E, G, H, K, M, N, P, Q, R, S, and T; X¹⁷² can be selected from A, D, E, G, I, K, L, P, Q, R, S, T, V, W, and Y; X¹⁷³ can be selected from A, D, E, F, G, I, Q, S, T, V, W, and Y; X¹⁷⁴ can be selected from A, I, E, I, L, M, N, Q, R, S, T, and V; X¹⁷⁵ can be selected from A, E, I, L, M, N, Q, R, S, T, and V; X¹⁷⁶ can be selected from D, E, H, L, Q, R, and V; X¹⁷⁷ can be selected from D, E, N, T, and V; X¹⁷⁸ can be selected from F, S, W, and Y; X¹⁷⁹ can be selected from A, D, E, G, H, K, N, Q, R, and Y; X¹⁸⁰ can be selected from G and R; X¹⁸¹ can be V; X¹⁸² can be selected from D, E, and Y; X¹⁸³ can be selected from F, I, and L; X¹⁸⁴ can be W; X¹⁸⁵ can be selected from C, H, I, L, P, Q, T, V, and Y; X¹⁸⁶ can be selected from A, D, E, G, M, R, S, T, and V; X¹⁸⁷ can be selected from A, D, E, F, G, I, M, N, P, Q, R, S, T, V, W, and Y; and X¹⁸⁸ can be selected from A, C, D, E, F, G, I, K, L, N, P, Q, R, S, and V.

[0502] In IL-2Rγc ligands of Formula (5), (5a), (5b), (5c), (5d), and/or (5e), X¹⁷¹ can be selected from H, K, and R; X¹⁷² can be selected from S, T, and Y; X¹⁷³ can be selected from D, E, F, I, and V; X¹⁷⁴ can be selected from I and V; X¹⁷⁵ can be selected from E, I, L, M, and V; X¹⁷⁶ can be selected from D, E, and Q; X¹⁷⁷ can be selected from D and E; X¹⁷⁸ can be selected from F and W; X¹⁷⁹ can be selected from D, E, N, and Q; X¹⁸⁰ can be G; X¹⁸¹ can be V; X¹⁸² can be selected from D and E; X¹⁸³ can be L; X¹⁸⁴ can be W; X¹⁸⁵ can be selected from I, L, Q, and V; X¹⁸⁶ can be selected from D and E; X¹⁸⁷ can be selected from A, D, E, F, G, I, M, N, P, Q, R, S, T, V, W, and Y; and X¹⁸⁸ can be selected from D, E, N, and Q.

[0503] In IL-2Rγc ligands of Formula (5), (5a), (5b), (5c), (5d), and/or (5e), X¹⁷¹ can be selected from K and R; X¹⁷² can be selected from S, T, and Y; X¹⁷³ can be selected from D, E, F, I, and V; X¹⁷⁴ can be V; X¹⁷⁵ can be selected from E, L, M, and V; X¹⁷⁶ can be Q; X¹⁷⁷ can be selected from D and E; X¹⁷⁸ can be W; X¹⁷⁹ can be selected from D, E, N, and Q; X¹⁸⁰ can be G; X¹⁸¹ can be V; X¹⁸² can be E; X¹⁸³ can be L; X¹⁸⁴ can be W; X¹⁸⁵ can be selected from I, L, Q, and V; X¹⁸⁶ can be selected from D and E; X¹⁸⁷ can be selected from A, D, E, F, G, I, M, N, P, Q, R, S, T, V, W, and Y; and X¹⁸⁸ can be selected from D, E, N, and Q.

[0504] In IL-2Rγc ligands of Formula (5), X¹⁷¹ can be selected from H, K, and R.

[0505] In IL-2Rγc ligands of Formula (5)-(5a), X¹⁷² can be selected from S, T, and Y.

[0506] In IL-2Rγc ligands of Formula (5)-(5b), X¹⁷³ can be selected from D, E, F, I, L, M, V, W, and Y.

[0507] In IL-2Rγc ligands of Formula (5)-(5b), X¹⁷³ can be selected from D and E.

[0508] In IL-2Rγc ligands of Formula (5)-(5b), X¹⁷³ can be selected from F, I, L, M, V, W, and Y.

[0509] In IL-2Rγc ligands of Formula (5)-(5c), X¹⁷⁴ can be selected from F, I, L, M, V, W, and Y.

[0510] In IL-2Rγc ligands of Formula (5)-(5c), X¹⁷⁴ can be V.

[0511] In IL-2Rγc ligands of Formula (5)-(5d), X¹⁷⁵ can be selected from D, E, F, I, L, M, V, W, and Y.

[0512] In IL-2Rγc ligands of Formula (5)-(5d), X¹⁷⁵ can be selected from D and E.

[0513] In IL-2Rγc ligands of Formula (5)-(5d), X¹⁷⁵ can be selected from F, I, L, M, V, W, and Y.

[0514] In IL-2Rγc ligands of Formula (5)-(5e), X¹⁷⁶ can be selected from D, E, H, N, Q, S, T, and Y.

[0515] In IL-2Rγc ligands of Formula (5)-(5e), X¹⁷⁶ can be selected from E and Q.

[0516] In IL-2Rγc ligands of Formula (5)-(5e), X¹⁷⁷ can be selected from D and E.

[0517] In IL-2Rγc ligands of Formula (5)-(5e), X¹⁷⁸ can be selected from F, H, I, L, M, V, W, and Y.

[0518] In IL-2Rγc ligands of Formula (5)-(5e), X¹⁷⁸ can be selected from F, H, W, and Y.

[0519] In IL-2Rγc ligands of Formula (5)-(5e), X¹⁷⁸ can be W.

[0520] In IL-2Rγc ligands of Formula (5)-(5e), X¹⁷⁹ can be selected from D, E, H, N, Q, S, T, and Y.

[0521] In IL-2Rγc ligands of Formula (5)-(5e), X¹⁷⁹ can be selected from D, E, and Q.

[0522] In IL-2Rγc ligands of Formula (5)-(5e), X¹⁸⁰ can be G.

[0523] In IL-2Rγc ligands of Formula (5)-(5e), X¹⁸¹ can be V.

[0524] In IL-2Rγc ligands of Formula (5)-(5e), X¹⁸² can be E.

[0525] In IL-2Rγc ligands of Formula (5)-(5e), X¹⁸³ can be L.

[0526] In IL-2Rγc ligands of Formula (5)-(5d), X¹⁸⁴ can be W.

[0527] In IL-2Rγc ligands of Formula (5)-(5c), X¹⁸⁵ can be selected from F, I, L, M, V, W, and Y.

[0528] In IL-2Rγc ligands of Formula (5)-(5c), X¹⁸⁵ can be L.

[0529] In IL-2Rγc ligands of Formula (5)-(5b), X¹⁸⁶ can be E.

[0530] In IL-2Rγc ligands of Formula (5)-(5a), X¹⁸⁷ can be selected from an amino acid.

[0531] In IL-2Rγc ligands of Formula (5), X¹⁸⁸ can be selected from D and E.

[0532] In IL-2Rγc ligands of Formula (5), (5a), (5b), (5c), (5d), and/or (5e), X¹⁷¹ can be selected from H, K, and R; X¹⁷² can be selected from S, T, and Y; X¹⁷³ can be selected from D, E, F, I, L, M, V, W, and Y; X¹⁷⁴ can be selected from F, I, L, M, V, W, and Y; X¹⁷⁵ can be selected from D, E, F, I, L, M, V, W, and Y; X¹⁷⁶ can be selected from D, E, H, N, Q, S, T, and Y; X¹⁷⁷ can be selected from D and E; X¹⁷⁸ can be selected from F, H, I, L, M, V, W, and Y; X¹⁷⁹ can be selected from D, E, H, N, Q, S, T, and Y; X¹⁸⁰ can be G; X¹⁸¹ can be V; X¹⁸² can be E; X¹⁸³ can be L; X¹⁸⁴ can be selected from W; X¹⁸⁵ can be selected from F, I, L, M, V, W, and Y; X¹⁸⁶ can be E; X¹⁸⁷ can be selected from an amino acid; and X¹⁸⁸ can be selected from D and E.

[0533] In IL-2Rγc ligands of Formula (5), (5a), (5b), (5c), (5d), and/or (5e), X¹⁷¹ can be selected from H, K, and R; X¹⁷² can be selected from S, T, and Y; X¹⁷³ can be selected from D and E; X¹⁷⁴ can be V; X¹⁷⁵ can be selected from D and E; X¹⁷⁶ can be selected from E and Q; X¹⁷⁷ can be selected from D and E; X¹⁷⁸ can be selected from F, H, W, and Y; X¹⁷⁹ can be selected from D, E, and Q; X¹⁸⁰ can be G; X¹⁸¹ can be V; X¹⁸² can be E; X¹⁸³ can be L; X¹⁸⁴ can be W; X¹⁸⁵ can be selected from F, I, L, M, V, W, Y, H, N, Q, S, and T; X¹⁸⁶ can be E; X¹⁸⁷ can be selected from an amino acid; and X¹⁸⁸ can be selected from D and E.

[0534] In IL-2Rγc ligands of Formula (5), (5a), (5b), (5c), (5d), and/or (5e), X¹⁷¹ can be selected from H, K, and R; X¹⁷² can be selected from S, T, and Y; X¹⁷³ can be selected from F, I, L, M, V, W, and Y; X¹⁷⁴ can be V; X¹⁷⁵ can be selected from F, I, L, M, V, W, and Y; X¹⁷⁶ can be selected from E and Q; X¹⁷⁷ can be selected from D and E; X¹⁷⁸ can be selected from F, H, W, and Y; X¹⁷⁹ can be selected from D, E, and Q; X¹⁸⁰ can be G; X¹⁸¹ can be V; X¹⁸² can be E; X¹⁸³ can be L; X¹⁸⁴ can be W; X¹⁸⁵ can be selected from F, I, L, M, V, W, Y, H, N, Q, S, and T; X¹⁸⁶ can be E; X¹⁸⁷ can be selected from an amino acid; and X¹⁸⁸ can be selected from D and E.

[0535] In IL-2Rγc ligands of Formula (5), (5a), (5b), (5c), (5d), and/or (5e), X¹⁷¹ can be selected from H, K, and R; X¹⁷² can be selected from S, T, and Y; X¹⁷³ can be selected from D, E, F, I, L, M, V, W, and Y; X¹⁷⁴ can be V; X¹⁷⁵ can be selected from D, E, F, I, L, M, V, W, and Y; X¹⁷⁶ can be selected from D, E, H, N, Q, S, T, and Y; X¹⁷⁶ can be selected from E and Q; X¹⁷⁷ can be selected from D and E; X¹⁷⁸ can be W; X¹⁷⁹ can be selected from D, E, and Q; X″° can be G; X¹⁸¹ can be V; X¹⁸² can be E; X¹⁸³ can be L; X¹⁸⁴ can be W; X¹⁸⁵ can be selected from F, I, L, M, V, W, Y, H, N, Q, S, and T; X¹⁸⁶ can be E; X¹⁸⁷ can be selected from an amino acid; and X¹⁸⁸ can be selected from D and E.

[0536] An IL-2Rγc ligand can comprise an amino acid sequence selected from any one of SEQ ID NOS: 950-1028.

SEQ ID NO: 950
I E C D T S Y G V Y I C W Q
SEQ ID NO: 951
I E C E E W R G V E L C W Q
SEQ ID NO: 952
P E G R E V V V C R D W Y G V E L C W Q
SEQ ID NO: 953
I W G R T V V E C Q D W E G V E L C W Q
SEQ ID NO: 954
L A L R K E V V C Q E Y Y G V E L C W I
SEQ ID NO: 955
H E A R E V V V C Q D W Y G V E L C W Q
SEQ ID NO: 956
M V N R E V V V C E D W Y G V E L C W Q
SEQ ID NO: 957
T A N Q T V V E C Q V W G G V E L C W Q
SEQ ID NO: 958
V E C Q E W G G V E L C W C
SEQ ID NO: 959
D V E C V D W G G V E L C W H
SEQ ID NO: 960
I V C E E W R G V E L C W L
SEQ ID NO: 961
D F E R S Y V V C Q D W D G V E L C W I
SEQ ID NO: 962
A H S R Q E V V C E E W Y G V E L C W I
SEQ ID NO: 963
S A P E R W V E C E D W Q G V E L C W V
SEQ ID NO: 964
Y S R E L Y V Q C E D W E G V E L C W I
SEQ ID NO: 965
V V C Q D W E G V E L C W Q
SEQ ID NO: 966
D V V C Q N W E G V D L C W H
SEQ ID NO: 967
S A G R Q E V V C Q D W N G V E L C W I
SEQ ID NO: 968
G Q G R E V V V C H D W Y G V E L C W Q
SEQ ID NO: 969
D W R R S V V E C Q D W Y G V E L C W Q
SEQ ID NO: 970
D V V C Q N W D G V D L C W H
SEQ ID NO: 971
T L G R T V V E C Q D W G G V E L C W Q
SEQ ID NO: 972
R L L N S V V E C L D W E G V E L C W Q
SEQ ID NO: 973
I V C E D W R G V E L C W I
SEQ ID NO: 974
V V C Q E W E G V E L C W C
SEQ ID NO: 975
G D R P K E V V C E D W K G V E L C W I
SEQ ID NO: 976
E R P R S F I E C Q E W E G V E L C W L
SEQ ID NO: 977
E G S T T T I E C E E W A G V E L C W L
SEQ ID NO: 978
A N Q N T V V E C Q D W H G V E L C W Q
SEQ ID NO: 979
R S D D E V V V C Q E W E G V E L C W Q
SEQ ID NO: 980
I E C E E W A G V E L C W L
SEQ ID NO: 981
T W N M S E L E C Q D W N G V E I C W H
SEQ ID NO: 982
G N D D S Y I V C E E W K G V E L C W I
SEQ ID NO: 983
F A H H G V V E C Q E W Y G V E L C W Q
SEQ ID NO: 984
L N R S V W I E C E E Y E G V E L C W L
SEQ ID NO: 985
W S K K A E V V C E E W G G V E F C W I
SEQ ID NO: 986
R S N Q T V V E C Q D W E G V E L C W Q
SEQ ID NO: 987
V V C Q E W E G V E L C W Y A G E C M Q
SEQ ID NO: 988
I L C Q E F E G V E L C W L E E S L A E
SEQ ID NO: 989
K S Q V E C Q D W E G V E L C W V V S E
SEQ ID NO: 990
K I T V E C Q D W D G V E L C W P T W I
SEQ ID NO: 991
R P Q I E C Q E W Q G V E L C W T R E E
SEQ ID NO: 992
V S C Q E W D G V E L C W V D G D L A A
SEQ ID NO: 993
I M C Q E W D G V E L C W L E R D K A N
SEQ ID NO: 994
G L E I A C E D W Y G V E L C W L R R A
SEQ ID NO: 995
G Y G V L C Q E W Q G V E L C W P V Q R E A G V
SEQ ID NO: 996
P Y G V V C Q D W A G V E L C W V E N R
SEQ ID NO: 997
K L T V E C Q D W D G V E L C W V G V E
SEQ ID NO: 998
I N C Q T W N G V E L C W V D E G L Y Q
SEQ ID NO: 999
V V C Q E W E G V E L C W V E P P L L P
SEQ ID NO: 1000
R V Q V E C E D W N G V E L C W P V R V
SEQ ID NO: 1001
D R Q V V C E E W D G V E L C W I E E S
SEQ ID NO: 1002
K T T V A C Q D W G G V E L C W V E R V
SEQ ID NO: 1003
R P E V V C Q E W E G V E L C W I S P L
SEQ ID NO: 1004
R L G V E C Q E W E G V D L C W I S A F
SEQ ID NO: 1005
K P V V V C E E W Q G V E L C W L E I Q
SEQ ID NO: 1006
V V C E V F Q G V E L C W C E N E E F T
SEQ ID NO: 1007
T D E V S C Q E W E G V E L C W I E R Q
SEQ ID NO: 1008
P V E V R C Q E W E G V E L C W V V G I
SEQ ID NO: 1009
G P E V V C E E F N R V E L C W V E Y N
SEQ ID NO: 1010
K Y I V E C Q E W G G V E L C W P E M V
SEQ ID NO: 1011
V T C Q E Y E G V E L C W T V G C A Y S
SEQ ID NO: 1012
V V C Q E W E G V E L C W Q T G P G A H A
SEQ ID NO: 1013
I V C E E Y N G V E L C W V E T S V K P
SEQ ID NO: 1014
E Q Q V V C Q E W N G V E L C W I E A G
SEQ ID NO: 1015
Q L G V E C Q N W R G V E L C W V S E I
SEQ ID NO: 1016
T A E V V C Q E W D G V E L C W I E V L
SEQ ID NO: 1017
S P S I V C E E W A G V E L C W V D Y S
SEQ ID NO: 1018
A V C Q D W Y G V E L C W C M Q D I L D
SEQ ID NO: 1019
V E C E E W G G V E L C W L A D E V M W
SEQ ID NO: 1020
H S T V I C Q D W D G V E L C W I E N D
SEQ ID NO: 1021
K K I V V C Q D W G G V E L C W T E D D
SEQ ID NO: 1022
S V E V V C E E W H G V E L C W P V F I
SEQ ID NO: 1023
R W A V S C Q D W Q G I E L C W P E W D
SEQ ID NO: 1024
R T G V E C Q D W H G V E L C W P V W E
SEQ ID NO: 1025
G Y G V V C E D F R G V E L C W L E R K
SEQ ID NO: 1026
R T E V E C E D W E G V E L C W L
SEQ ID NO: 1027
I L C E E W Q G V E L C W L E G G G S
SEQ ID NO: 1028
V G I E C E E W A G V E L C W L

[0537] An IL-2Rγc ligand can comprise an amino acid sequence selected from any one of SEQ ID NOS: 944-1028, wherein the amino acid sequence can be terminated with flanking amino acids such as -G-G- (SEQ ID NO: 9399) on the N-terminus, on the C-terminus, or on both the N- and C-termini.

[0538] An IL-2Rβγc ligand can comprise an amino acid sequence selected from any one of SEQ ID NOS: 944-1028, wherein the amino acid sequence can be terminated with one or more amino acids on the N-terminus, on the C-terminus, or on both the N- and C-termini. For example, an amino acid sequence can include terminal glycines and/or serines. For example, an IL-2Rγc ligand can comprise a -G-G- (SEQ ID NO: 9399) moiety on the N-terminus, on the C-terminus, or on both the N- and C-termini.

[0539] An IL-2Rγc ligand can comprise an amino acid sequence selected from any one of SEQ ID NOS: 944-1028, wherein each amino acid independently comprises one or more of the following conservative substitutions: amino acids having a small hydrophobic side chain comprising alanine (A), glycine (G), proline (P), serine (S), or threonine (T); amino acids having a hydroxyl-containing side chain comprising serine (S), threonine (T), or tyrosine (Y); amino acids having an acidic side chain comprising aspartate (D) or glutamate (E); amino acids having a polar-neutral side chain comprising histidine (H), asparagine (N), glutamine (Q), serine (S), threonine (T), or tyrosine (Y); amino acids having a basic side chain comprising arginine (R), lysine (K), or histidine (H); amino acids having a large hydrophobic side chain comprising isoleucine (I), leucine (L), methionine (M), valine (V), phenylalanine (F), tyrosine (Y), or tryptophan (W); and amino acids having an aromatic side chain comprising phenylalanine (F), histidine (H), tryptophan (W), or tyrosine (Y).

[0540] IL-2Rγc ligands of SEQ ID NOS: 944-1028 bind to the human IL-2Rγc subunit with an IC₅₀ of less than 100 μM.

[0541] An IL-2Rγc ligand can comprise an amino acid sequence having an amino acid similarity greater than 60%, greater than 70%, greater than 75%, greater than 80%, greater than 85%, greater than 90%, or greater than 95% to the amino acid sequence of any one of SEQ ID NOS: 944-1028.

[0542] An IL-2Rγc ligand provided by the present disclosure can comprise a truncated amino acid sequence of any one of SEQ ID NOS: 944-1028.

[0543] An IL-2Rγc ligand provided by the present disclosure can comprise an amino acid sequence selected from any one of SEQ ID NOS: 944-1028, or a truncated amino acid sequence of any one of SEQ ID NOS: 944-1028, wherein the amino acid sequence can independently comprise from 1 to 4 glycines (G) (SEQ ID NO: 9429) on the N-terminus, on the C-terminus, or on both the N- and C-termini.

[0544] An IL-2Rγc ligand provided by the present disclosure can comprise an amino acid sequence selected from any one of SEQ ID NOS: 944-1028, or a truncated amino acid sequence of any one of SEQ ID NOS: 944-1028, wherein the amino acid sequence comprises one or more amino acid substitutions such as from 1 to 5 amino acid substitutions. The amino acid substitutions can comprise conservative amino acid substitutions.

[0545] An IL-2Rγc ligand can comprise an amino acid sequence having an amino acid sequence similarity greater than 60%, greater than 70%, greater than 75%, greater than 80%, greater than 85%, greater than 90%, or greater than 95% to the amino acid sequence of any one of SEQ ID NOS: 944-1028 or to a truncated amino acid sequence of any one of SEQ ID NOS: 944-1028.

[0546] An IL-2Rγc ligand of any one of SEQ ID NOS: 944-1028 can bind to the hu-IL-2Rγc subunit with an IC₅₀ of less than 10 μM as determined using phage ELISA competition assays.

[0547] An IL-2Rγc ligand of any one of SEQ ID NOS: 944-1028, a truncated IL-2Rγc ligand of any one of SEQ ID NOS: 944-1028, or a substituted IL-2Rγc ligand of any one of SEQ ID NOS: 944-1028 can bind to the hu-IL-2Rγc subunit with an IC₅₀ of less than 100 μM or less than 10 μM as determined using phage ELISA competition assays.

[0548] An IL-2Rγc ligand can comprise an amino acid sequence selected from any one of IL-2Rγc ligands (GL1)-(GL7) having SEQ ID NOS: 965, 980, 981, 985, 1024, 1026, and 1028. The amino acid sequence of these IL-2Rγc ligands is shown in Table 2.

TABLE 2
IL-2Rγc Ligands.

(GL1)
SEQ ID NO: 980
I E C E E W A G V E L C W L
(GL2)
SEQ ID NO: 965
V V C Q D W E G V E L C W Q
(GL3)
SEQ ID NO: 985
W S K K A E V V C E E W G G V E F C W I
(GL4)
SEQ ID NO: 1024
R T G V E C Q D W H G V E L C W P V W E
(GL5)
SEQ ID NO: 1028
V G I E C E E W A G V E L C W L
(GL6)
SEQ ID NO: 981
T W N M S E L E C Q D W N G V E I C W H
(GL7)
SEQ ID NO: 1026
R T E V E C E D W E G V E L C W L

[0549] An IL-2Rγc ligand can comprise an amino acid sequence having an amino acid sequence similarity greater than 60%, greater than 70%, greater than 75%, greater than 80%, greater than 85%, greater than 90%, or greater than 95%, to the amino acid sequence of any one of SEQ ID NOS: 965, 980, 981, 985, 1024, 1026, and 1028.

[0550] An IL-2Rγc ligand provided by the present disclosure can comprise a truncated amino acid sequence of any one of SEQ ID NOS: 965, 980, 981, 985, 1024, 1026, and 1028.

[0551] An IL-2Rγc ligand provided by the present disclosure can comprise an amino acid sequence selected from any one of SEQ ID NOS: 965, 980, 981, 985, 1024, 1026, and 1028, or a truncated amino acid sequence of any one of SEQ ID NOS: 965, 980, 981, 985, 1024, 1026, and 1028, wherein the amino acid sequence can independently comprise from 1 to 4 glycines (G) (SEQ ID NO: 9429) on the N-terminus, on the C-terminus, or on both the N- and C-termini.

[0552] An IL-2Rγc ligand provided by the present disclosure can comprise an amino acid sequence selected from any one of SEQ ID NOS: 965, 980, 981, 985, 1024, 1026, and 1028, or a truncated amino acid sequence of any one of SEQ ID NOS: 965, 980, 981, 985, 1024, 1026, and 1028, wherein the amino acid sequence comprises one or more amino acid substitutions such as from 1 to 5 amino acid substitutions. The amino acid substitutions can comprise conservative amino acid substitutions.

[0553] An IL-2Rγc ligand can comprise an amino acid sequence having an amino acid sequence similarity greater than 60%, greater than 70%, greater than 75%, greater than 80%, greater than 85%, greater than 90%, or greater than 95% to the amino acid sequence of any one of SEQ ID NOS: 965, 980, 981, 985, 1024, 1026, and 1028 or to a truncated amino acid sequence of any one of SEQ ID NOS: 965, 980, 981, 985, 1024, 1026, and 1028.

[0554] An IL-2Rγc ligand of any one of SEQ ID NOS: 965, 980, 981, 985, 1024, 1026, and 1028 can bind to the hu-IL-2Rγc subunit with an IC₅₀ of less than 10 μM as determined using phage ELISA competition assays.

[0555] An IL-2Rγc ligand of any one of SEQ ID NOS: 965, 980, 981, 985, 1024, 1026, and 1028, a truncated IL-2Rγc ligand of any one of SEQ ID NOS: 965, 980, 981, 985, 1024, 1026, and 1028, or a substituted IL-2Rγc ligand of any one of SEQ ID NOS: 965, 980, 981, 985, 1024, 1026, and 1028 can bind to the hu-IL-2Rγc subunit with an IC₅₀ of less than 100 μM or less than 10 μM as determined using phage ELISA competition assays.

[0556] An Rγc ligand can have any one of SEQ ID NOS: 1032, 1034, 1042, 1044, 1051-1060, and 1601-1613.

SEQ ID NO: 1032
S L L K C Y N A S T C A S V F
SEQ ID NO: 1034
C G M A I G D L C M W T
SEQ ID NO: 1042
R W G D V G D L L M P L
SEQ ID NO: 1044
R S C Y Y K R P R L W C S E
SEQ ID NO: 1051
D C S M W E G V E L C W G G
SEQ ID NO: 1052
G G V V C Q D W E G V E L C W Q G G
SEQ ID NO: 1053
G G V M C E R W Q G V E L C W L G G
SEQ ID NO: 1054
G G R T G V E C Q D W H G V E L C W P V W E G G
SEQ ID NO: 1055
G G V G I E C E E W A G V E L C W L G G
SEQ ID NO: 1056
G G T W N M S E L E C Q D W N G V E I C W H G G
SEQ ID NO: 1057
G G R T E V E C E D W E G V E L C W L G G
SEQ ID NO: 1058
G G W S K K A E V V C E E W G G V E F C W I G G
SEQ ID NO: 1059
W S K K A E V V C E E W G G V E F C W I
SEQ ID NO: 1060
Y S R E L Y V Q C E D W E G V E L C W I
SEQ ID NO: 1601
G G D C S M W E G V E L C W G G
SEQ ID NO: 1602
G G V M C E R W Q G V E L C W L G G
SEQ ID NO: 1603
G G V G I E C E E W A G V E L C W L G G
SEQ ID NO: 1604
G G T W N M S E L E C Q D W N G V E I C W H G G
SEQ ID NO: 1605
G G R T E V E C E D W E G V E L C W L G G
SEQ ID NO: 1606
G G R T G V E C Q D W H G V E L C W P V W E G G
SEQ ID NO: 1607
G G V V C Q D W E G V Abu L C W Q G G
SEQ ID NO: 1608
G G V V C Q D W E G V Alb L C W Q G G
SEQ ID NO: 1609
G G V V C Q D W E G V DA L C W Q G G
SEQ ID NO: 1610
G G V V C Q D W E G V S L C W Q G G
SEQ ID NO: 1611
G G V V C Q D W E G V G L C W Q G G
SEQ ID NO: 1612
G G V V C Q D W E G V E L C W Q P P A
SEQ ID NO: 1613
G G V V C Q D W E G V E L C W Q G P P A

[0557] An Rγc ligand provided by the present disclosure can comprise a truncated amino acid sequence of any one of SEQ ID NOS: 1032, 1034, 1042, 1044, 1051-1060, and 1601-1613.

[0558] An Rγc ligand provided by the present disclosure can comprise an amino acid sequence selected from any one of SEQ ID NOS: 1032, 1034, 1042, 1044, 1051-1060, and 1601-1613, or a truncated amino acid sequence of any one of SEQ ID NOS: 1032, 1034, 1042, 1044, 1051-1060, and 1601-1613, wherein the amino acid sequence can independently comprise from 1 to 4 glycines (G) (SEQ ID NO: 9429) on the N-terminus, on the C-terminus, or on both the N- and C-termini.

[0559] An Rγc ligand provided by the present disclosure can comprise an amino acid sequence selected from any one of SEQ ID NOS: 1032, 1034, 1042, 1044, 1051-1060, and 1601-1613, or a truncated amino acid sequence of any one of SEQ ID NOS: 1032, 1034, 1042, 1044, 1051-1060, and 1601-1613, wherein the amino acid sequence comprises one or more amino acid substitutions such as from 1 to 5 amino acid substitutions. The amino acid substitutions can comprise conservative amino acid substitutions.

[0560] An Rγc ligand can comprise an amino acid sequence having an amino acid sequence similarity greater than 60%, greater than 70%, greater than 75%, greater than 80%, greater than 85%, greater than 90%, or greater than 95% to the amino acid sequence of any one of SEQ ID NOS: 1032, 1034, 1042, 1044, 1051-1060, and 1601-1613 or to a truncated amino acid sequence of any one of SEQ ID NOS: 1032, 1034, 1042, 1044, 1051-1060, and 1601-1613.

[0561] An Rγc ligand of any one of SEQ ID NOS: 1032, 1034, 1042, 1044, 1051-1060, and 1601-1613, a truncated Rγc ligand of any one of SEQ ID NOS: 1032, 1034, 1042, 1044, 1051-1060, and 1601-1613, or a substituted Rγc ligand of any one of SEQ ID NOS: 1032, 1034, 1042, 1044, 1051-1060, and 1601-1613 bind to the hRγc subunit with an IC₅₀ of less than 100 μM or less than 10 μM as determined using phage ELISA competition assays.

[0562] An Rγc ligand of any one of SEQ ID NOS: 1601-1613 binds to the hRγc subunit with an IC₅₀ of less than 100 μM.

[0563] Certain IL-2Rγc ligands provided by the present disclosure can bind to a specific binding site on the IL-2Rγc subunit that is different than the IL-2Rγc binding site on the IL-2Rγc subunit to which IL-2 binds.

[0564] These IL-2Rγc ligands do not compete for binding to the specific IL-2Rγc binding site with IL-2, have no detectable binding to the IL-2Rβ subunit, and bind to the IL-2Rγc subunit with an IC₅₀ of less than 10 μM.

[0565] The specific binding site on the IL-2Rγc subunit can be characterized by at least the following properties: (1) a group of IL-2Rγc ligands bind to the specific binding site on the hu-IL-2Rγc subunit with an IC₅₀ of less than 10 μM; (2) IL-2Rγc ligands within the group competitively bind to the specific binding site on the IL-2Rγc subunit with other IL-2Rγc ligands within the group; and (3) IL-2Rγc ligands within the group do not compete for binding to the specific binding site with an IL-2Rγc ligand having the amino acid sequence of SEQ ID NO: 1032.

[0566] An IL-2Rβ ligand having the amino acid sequence of SEQ ID NO: 58 does not compete for binding to the binding site with the group of IL-2Rγc ligands.

[0567] The group of IL-2Rγc ligands comprises IL-2Rγc ligands having an amino acid sequence of SEQ ID NOS: 198, 202, 224, 236, 248, and 266.

[0568] IL-2Rγc ligands within the group of IL-2Rγc ligands bind to the IL-2Rγc subunit with an IC₅₀ of less than 100 μM and bind to the IL-2Rβ subunit with an IC₅₀ of greater than 100 μM.

[0569] The specific binding site of the IL-2Rβ subunit for these IL-2Rγc ligands can be characterized using competition binding assays as described, for example, in Examples 24-27.

[0570] An IL-2Rγc ligand provided by the present disclosure can comprise a pH-biased IL-2Rγc ligand.

[0571] pH-Biased IL-2Rγc ligands bind to the IL-2Rγc subunit at pH 6 with an IC₅₀ that is less than the IC₅₀ for binding of the same IL-2Rγc ligand to the IL-2Rγc subunit at pH 7.5. The pH-biased binding affinity can be determined as described in Examples 24-27.

[0572] A pH-biased IL-2Rγc ligand can bind to the human IL-2Rγc subunit at pH 6 with an IC₅₀ that is at least at least 10% less than the IC₅₀ for binding to the human IL-2Rγc subunit at pH 7.5, at least 25% less, at least 50% less, at least 100% less, or at least 200% less than the IC₅₀ for binding to the human IL-2Rγc subunit at pH 7.5.

[0573] A pH-biased IL-2Rγc ligand can comprise, for example, from 5 to 30 amino acids.

[0574] A pH-biased IL-2Rγc ligand can bind to the human IL-2Rγc subunit at pH 6.0 with an IC₅₀ from 1 pM to 100 μM and can bind to the human IL-2Rγc subunit with an IC₅₀ greater than 100 μM at pH 7.5.

[0575] A pH-biased IL-2Rγc ligand can bind to the human IL-2Rγc subunit at pH 6.0 with an IC₅₀ from 0.1 μM to 50 μM and bind to the human IL-2Rγc subunit with an IC₅₀ greater than 100 μM at pH 7.5.

[0576] A pH-biased IL-2Rγc ligand can bind to the human IL-2Rγc subunit at pH 6.0 with an IC₅₀ of less than 100 μM.

[0577] A pH-biased IL-2Rγc ligand can bind to each of the human IL-2Rγc subunit and to the human IL-2Rγc subunit with an IC₅₀ of less than 100 μM and a bind to the human IL-2Rγc subunit with an IC₅₀ greater than 100 μM at pH 7.5.

[0578] A pH-biased IL-2Rγc ligand can bind to a mammalian IL-2Rγc subunit at pH 6.0 with an IC₅₀ of less than 100 μM and bind to the human IL-2Rγc subunit with an IC₅₀ greater than 100 μM at pH 7.5.

[0579] pH-Biased IL-2Rγc ligands can be identified using the methods described in Examples 23 and 24.

[0580] An IL-2Rβ ligand, an IL-2Rγc ligand, and an IL-2Rβγc ligand may not comprise any flanking amino acids bound to the N-terminus and/or to the C-terminus of the ligand.

[0581] IL-2Rβ ligands and IL-2Rγc ligands can comprise one or more flanking amino acids bound to the N-terminus and/or to the C-terminus of the ligand.

[0582] The flanking amino acids can separate the portion of the ligand that interacts with IL-2R from other portions of a ligand, an IL-2Rβγc ligand, and/or a ligand construct.

[0583] A ligand can comprise flanking amino acids such as, for example, from 1 to 20 amino acids, from 1 to 10 amino acids, such as from 1 to 8 amino acids, from 2 to 6 amino acids, or from 2 to 4 amino acids bound to the N-terminus and/or the C-terminus of the ligand.

[0584] Flanking amino acids can comprise any suitable naturally occurring or non-naturally occurring amino acids.

[0585] Flanking amino acids can be selected from serine and flexible amino acids such as serine.

[0586] A ligand can comprise flanking amino acids such as, for example, terminal glycine groups on the N-terminus and/or the C-terminus of the respective ligand. For example, a ligand can comprise flanking amino acids having an amino acid sequence of any one of SEQ ID NOS: 9380-9407 and 9419-9428. For example, an IL-2Rβ ligand, an IL-2Rγc ligand, or an IL-2Rβγc ligand can independently comprise flanking amino acids such as 1, 2 or 3 terminal glycines.

[0587] An IL-2Rβ ligand, an IL-2Rγc ligand, and an IL-2Rβγc ligand can comprise, for example, from 1 to 20 amino acids, from 1 to 10 amino acids, such as from 1 to 8 amino acids, from 2 to 6 amino acids, or from 2 to 4 amino acids bound to the N-terminus and/or the C-terminus of the IL-2Rβ and IL-2Rγc ligand.

[0588] Flanking amino acids can comprise any suitable naturally occurring or non-naturally occurring amino acids.

[0589] Flanking amino acids can be selected from flexible amino acids such as glycine and serine. An IL-2Rβ ligand and/or an IL-2Rγc ligand can comprise, for example, terminal glycine groups on the N-terminus and/or the C-terminus of the respective ligand. For example, an IL-2Rβ and an IL-2Rγc ligand can comprise (G)n glycine groups (SEQ ID. NO: 9380) where n is from 1 to 20. For example, each of an IL-2Rβ ligand and an IL-2Rγc ligand can independently comprise 1, 2 or 3 terminal glycine groups. For example, a ligand having SEQ ID NO: 878, having the amino acid sequence -W-H-P-C-W-I-A-Q-L-G E L C D L E can independently include, for example, one, two, or three glycines on both the N-terminus and the C-terminus such that the ligand can have the amino acid sequence -G-W-H-P-C-W-I-A-Q-L-G-E-L-C-D-L-E-G- (SEQ ID NO: 1209), -G-G-W-H-P-C-W-I-A-Q-L-G-E-L-C-D-L-E-G-G- (SEQ ID NO: 1210), or -G-G-G-W-H-P-C-W-I-A-Q-L-G-E-L-C-D-L-E-G-G-G- (SEQ ID NO: 1211), respectively.

[0590] An IL-2Rβ ligand, an IL-2Rγc ligand, and an IL-2Rβγc ligand provided by the present disclosure can comprise, for example, an amino acid substitution such as from 1 to 10 amino acid substitutions, from 1 to 8, from 1 to 6, from 1 to 4, such as 1, 2, 3, 4, 5, 6, 7, 8, 9, or 10 amino acid substitutions. An amino acid substitution can be a conservative amino acid substitution.

[0591] A ligand can comprise a truncated amino acid sequence.

[0592] A truncated amino acid sequence refers to an amino acid sequence which does not include one or more of the terminal amino acids. For example, in a truncated peptide one or more amino acids is removed from the N-terminus, the C-terminus or both the N-terminus and the C-terminus. Removing one or more amino acids from the N-terminus and/or the C-terminus of an amino acid sequence provided by the present disclosure can result in improved properties. Thus, ligands such as IL-2Rβ ligands and IL-2Rγc ligands provided by the present disclosure include truncated IL-2Rβ ligands and truncated Rγc ligands.

[0593] Examples of truncated IL-2Rβ ligands based on SEQ ID NO: 9301 include ligands having an amino acid sequence of any one of SEQ ID NOS: 9301-9314, 865, and 612.

```
SEQ ID NO: 9301
G G W Y P C W M A Q L G E L C D L D G G
SEQ ID NO: 9302
    G W Y P C W M A Q L G E L C D L D G G
SEQ ID NO: 9303
        W Y P C W M A Q L G E L C D L D G G
SEQ ID NO: 9304
            Y P C W M A Q L G E L C D L D G G
SEQ ID NO: 9305
                P C W M A Q L G E L C D L D G G
SEQ ID NO: 9306
                    C W M A Q L G E L C D L D G G
SEQ ID NO: 9307
G G W Y P C W M A Q L G E L C D L D G
SEQ ID NO: 9308
G G W Y P C W M A Q L G E L C D L D
SEQ ID NO: 9309
G G W Y P C W M A Q L G E L C D L
SEQ ID NO: 9310
G G W Y P C W M A Q L G E L C D
SEQ ID NO: 9311
G G W Y P C W M A Q L G E L C
SEQ ID NO: 9312
    G W Y P C W M A Q L G E L C D L D G
SEQ ID NO: 9313
        W Y P C W M A Q L G E L C D L D G
SEQ ID NO: 865
        W Y P C W M A Q L G E L C D L D
SEQ ID NO: 612
            Y P C W M A Q L G E L C D L
SEQ ID NO: 9314
                P C W M A Q L G E
```

[0594] Examples of truncated IL-2Rγc ligands based on SEQ ID NO: 9340 include ligands having an amino acid sequence of any one of SEQ ID NOS: 9340-9353 and 965.

```
SEQ ID NO: 9340
G G V V C Q D W E G V E L C W Q G G
SEQ ID NO: 9341
    G V V C Q D W E G V E L C W Q G G
SEQ ID NO: 9342
        V V C Q D W E G V E L C W Q G G
SEQ ID NO: 9343
            V C Q D W E G V E L C W Q G G
SEQ ID NO: 9344
                C Q D W E G V E L C W Q G G
SEQ ID NO: 9345
G G V V C Q D W E G V E L C W Q G
SEQ ID NO: 9346
G G V V C Q D W E G V E L C W Q
SEQ ID NO: 9347
G G V V C Q D W E G V E L C W
SEQ ID NO: 9348
G G V V C Q D W E G V E L C
SEQ ID NO: 9349
    G V V C Q D W E G V E L C W Q G
SEQ ID NO: 965
        V V C Q D W E G V E L C W Q
SEQ ID NO: 9350
            V C Q D W E G V E L C W Q
SEQ ID NO: 9351
            V C Q D W E G V E L C W
SEQ ID NO: 9352
                C Q D W E G V E L C W
SEQ ID NO: 9353
                C Q D W E G V E L C
```

[0595] An IL-2Rβ ligand provided by the present disclosure can have greater than 60%, greater than 70%, greater than 75%, greater than 80%, greater than 85%, greater than 90%, or greater than 95% sequence similarity to any one of SEQ ID NOS: 805-903. An IL-2Rβ ligand provided by the present disclosure can have greater than 60%, greater than 70%, greater than 75%, greater than 80%, greater than 85%, greater than 90%, or greater than 95% sequence similarity to SEQ ID NO: 865.

[0596] An IL-2Rγc ligand provided by the present disclosure can have greater than 60%, greater than 70%, greater than 75%, greater than 80%, greater than 85%, greater than 90%, or greater than 95% sequence similarity to any one of SEQ ID NOS: 944-1028. An IL-2Rγc ligand provided by the present disclosure can have greater than 60%, greater than 70%, greater than 75%, greater than 80%, greater than 85%, greater than 90%, or greater than 95% sequence similarity to SEQ ID NO: 965.

[0597] An IL-2Rβ ligand, an IL-2Rγc ligand, and an IL-2Rβγc ligand provided by the present disclosure can comprise an acetyl terminal group on the N-terminus and a carboxamide group on the C-terminus.

[0598] An IL-2Rβγc ligand can comprise an IL-2Rβ ligand and an IL-2Rγc ligand bound to an IL-2Rβγc ligand linker.

[0599] Each of an IL-2Rβ ligand and an IL-2Rγc ligand can independently be covalently bound to an IL-2Rβγc ligand linker through the N-terminus or the C-terminus of the respective ligand. For example, an IL-2Rβ ligand can be bound to the IL-2Rβγc ligand linker through the N-terminus and an IL-2Rγc ligand can be bound to an IL-2Rβγc ligand linker through the N-terminus; an IL-2Rβ ligand can be bound to an IL-2Rβγc ligand linker through the N-terminus and an IL-2Rγc ligand can be bound to the IL-2Rβγc ligand linker through the C-terminus; an IL-2Rβ ligand can be bound to the IL-2Rβγc ligand linker through the C-terminus and an IL-2Rγc ligand can be bound to the IL-2Rβγc ligand linker through the N-terminus; or an IL-2Rβ ligand can be bound to the IL-2Rβγc ligand linker through the C-terminus and an IL-2Rγc ligand can be bound to the IL-2Rβγc linker through the C-terminus.

[0600] Examples of IL-2Rβγc ligands having various orientations of the IL-2Rβ and IL-2Rγc ligands are shown in FIG. 1. As shown in FIG. 1, IL-2Rβγc ligands having various C/N orientations of the IL-2Rβ ligand and the IL-2Rγc ligand can be synthesized using click chemistry. The triazole linkage is a schematic representation of an IL-2Rγc ligand linker, which can comprise various chemical moieties and can have various lengths and properties. Examples of certain non-peptidyl IL-2Rβγc ligand linkers are shown in Table 3.

[0601] An IL-2Rβγc ligand linker can be configured to facilitate binding of an IL-2Rβγc ligand to the IL-2Rβ subunit and to the IL-2Rγc subunit of IL-2R. For example, an IL-2Rβγc ligand linker can be configured to facilitate activation of IL-2R by the IL-2Rβγc ligand. For example, an IL-2Rβγc ligand can be configured to induce IL-2R-mediated STAT5 phosphorylation in TF-1β cells and in NK-92 cells.

[0602] An IL-2Rβγc ligand linker can have a length, for example, from 2 Å to 100 Å, from 2 Å to 80 Å, from 2 Å to 60 Å, from 2 Å to 40 Å, from 2 Å to 20 Å, from 4 Å to 18 Å, from 6 Å to 16 Å, or from 8 Å to 14 Å. A ligand linker can have a length, for example, less than 100 Å, less than 80 Å, less than 60 Å, less than 40 Å, less than 20 Å, less than 15 Å, or less than 10 Å.

[0603] An IL-2Rβγc ligand linker can comprise a backbone having, for example, from 2 to 50 bonds, from 2 to 45 bonds, from 2 to 40 bonds, from 2 to 35 bonds, from 2 to 30 bonds, from 2 to 25 bonds, from 2 to 20 bonds, from 4 to 18 bonds, from 6 to 16 bonds, or from 8 to 14 bonds. An IL-2Rβγc ligand linker can comprise a backbone having, for example, less than 50 bonds, less than 40 bonds, less than 30 bonds, less than 20 bonds, or less than 10 bonds.

[0604] An IL-2Rβγc ligand linker provided by the present disclosure can comprise a peptidyl IL-2Rβγc ligand or a chemical IL-2Rβγc linker.

[0605] An IL-2Rβγc ligand linker provided by the present disclosure can comprise a peptidyl IL-2Rβγc ligand linker.

[0606] A peptidyl ligand linker can comprise, for example, from 2 to 100 amino acids, from 2 to 80 amino acids, from 2 to 60 amino acids, from 2 to 40 amino acids, from 2 to 20 amino acids, from 5 to 10 amino acids, or from 2 to 5 amino acids. A peptidyl ligand linker can comprise, for example, less than 100 amino acids, less than 80 amino acids, less than 40 amino acids, less than 20 amino acids, less than 15 amino acids, less than 10 amino acids, or less than 5 amino acids. Amino acids forming a peptidyl IL-2Rβγc ligand linker can comprise naturally occurring amino acids and/or non-naturally occurring amino acids.

[0607] A peptidyl IL-2Rβγc ligand linker can comprise, for example, flexible amino acids such as glycine, serine, and/or threonine. Flexible linkers can include small, non-polar amino acids such as glycine or polar amino acids such as serine or threonine. The small size of these amino acids provides flexibility and allows for mobility of the connecting functional domains. Incorporation of serine or threonine can maintain the stability of the linker in aqueous solutions by forming hydrogen bonds with water molecules, and thereby reduces unfavorable interactions between the linker and protein moieties. Amino acids such as lysine and glutamic acid can be included to improve solubility. The length of a peptidyl IL-2Rβγc linker can be selected to provide a suitable separation between the IL-2Rβ and IL-2Rγc ligands to favor a desired interaction with IL-2R such as enhancing agonist activity. Examples of flexible linkers include peptides having an amino acid sequence of any one of SEQ ID NOS: 9380-9407.

[0608] A peptidyl IL-2Rβγc ligand linker can be a rigid linker. Rigid linkers can be proline rich and can include other amino acids such as alanine, lysine, and/or glutamic acid. Examples of rigid peptidyl ligand linkers include peptides having an amino acid sequence of any one of SEQ ID NOS: 9419-9428.

[0609] IL-2Rβγc ligands comprising a peptidyl IL-2Rβγc ligand linker can be synthesized using non-recombinant methods such as using the solid phase synthesis as described in Example 1 or can be synthesized using recombinant DNA technology.

[0610] An IL-2Rβγc ligand linker can comprise a synthetic chemical IL-2Rβγc ligand linker. A synthetic chemical IL-2Rβγc ligand linker refers to a linker that is synthesized using chemical methods and can include amino acids or may not include amino acids. A synthetic chemical IL-2Rβγc ligand linker can comprise a triazole moiety.

[0611] A synthetic chemical ligand linker can have the structure, for example, of Formula (L2)-(L13) as shown in Table 3.

TABLE 3
Examples of IL-2Rβγc synthetic chemical linkers.

| Formula | |
|---|---|
| No. | Chemical Structure |
| (L1) | [chemical structure] |
| (L2) | [chemical structure] |
| (L3) | [chemical structure] |
| (L4) | [chemical structure] |
| (L5) | [chemical structure] |
| (L6) | [chemical structure] |
| (L7) | [chemical structure] |
| (L8) | [chemical structure] |
| (L9) | [chemical structure] |
| (L10) | [chemical structure] |
| (L11) | [chemical structure] |
| (L12) | [chemical structure] |
| (L13) | [chemical structure] |
| (L14) | [chemical structure] |
| (L15) | [chemical structure] |
| (L16) | [chemical structure] |
| (L17) | [chemical structure] |

[chemical structure]

[0612] In IL-2Rγc ligand linkers (L2), (L4)-(L7), (L12) and L13), m and/or n can be an integer, for example, from 1 to 10.

[0613] A chemical IL-2Rβγc ligand linker can be synthesized using click chemistry to provide IL-2Rβγc ligands having various C/N orientations of the IL-2Rβ and IL-2Rγc ligands. C/N orientation refers to the terminus of the IL-2Rβ and IL-2Rγc which are bonded to the IL-2Rβγc ligand linker. For example, for an IL-2Rβγc ligand having a C/N orientation, the C-terminus of the IL-2Rβ ligand is bonded to the IL-2Rβγc ligand linker, and the N-terminus of the IL-2Rγc ligand is bonded to the IL-2Rβγc ligand linker. As another example, for an IL-2Rβγc ligand having an N/C orientation, the N-terminus of the IL-2Rβ ligand is bonded to the IL-2Rβγc ligand linker, and the C-terminus of the IL-2Rγc ligand is bonded to the IL-2Rβγc ligand linker.

[0614] An example of a method for preparing an IL-2Rβγc ligand having a synthetic ligand linker is described in Example 2.

[0615] IL-2Rβ and IL-2Rγc ligands can be prepared using standard solid phase peptide synthesis and Fmoc-protected amino acids. A swollen resin can be treated with either an activated solution of Fmoc-propargyl glycine or 2-(Fmoc-NH)-azido-pentanoic acid to provide the corresponding Fmoc-protected resin. The alkyne-containing moiety and the azide-containing moiety can be configured to have, for example, a desired length, rigidity/flexibility, polarity, lipophilicity, and/or steric property. The protected resin can be subjected to repeated cycles of Fmoc-amino acid couplings with HATU activation and Fmoc removal to synthesize the respective IL-2Rβ ligand or IL-2Rγc ligand. After Fmoc removal from the final amino acid of the IL-2Rβ or IL-2Rγc ligand and acylation of terminal amine groups, the ligands can be cleaved from the resin and purified.

[0616] The alkyne-containing moiety and azide-containing moiety can be reacted, for example, in the presence of CuSO₄ and a metal chelator to provide an IL-2Rβγc ligand comprising a synthetic chemical IL-2Rβγc ligand linker. The reacted alkyne-containing moiety and azide-containing moiety form the chemical ligand linker. For example, referring to Tables 3-5, an alkyne-containing moiety of Formula (AL) in Table 4 can be reacted with an azide-containing moiety of Formula (AZ) in Table 5 to provide a chemical IL-2Rβγc ligand linker of Formula (L) in Table 3.

[0617] Using this click-chemistry method, IL-2Rβγc ligands comprising IL-2Rβ and IL-2Rγc ligands having differing N-terminal and C-terminal orientations and different ligand linker lengths can be synthesized.

[0618] Examples of alkyne-containing moieties are provided in Table 4 and examples of azide-containing moieties are provided in Table 5.

TABLE 4
Examples of alkyne-containing moieties.

| Formula | |
|---|---|
| No. | Chemical Structure |
| (AL1) | [chemical structure] |
| (AL2) | [chemical structure] |
| (AL3) | [chemical structure] |
| (AL4) | [chemical structure] |
| (AL5) | [chemical structure] |
| (AL6) | [chemical structure] |
| (AL7) | [chemical structure] |
| (AL8) | [chemical structure] |
| (AL9) | [chemical structure] |

TABLE 5
Examples of azide-containing moieties,

| Formula | |
|---|---|
| No. | Chemical Structure |
| (AZ1) | [chemical structure] |
| (AZ2) | [chemical structure] |
| (AZ3) | [chemical structure] |
| (AZ4) | [chemical structure] |
| (AZ5) | [chemical structure] |

[0619] An IL-2Rβγc ligand can comprise N- and/or C-terminal modifications to prevent or minimize degradation by aminopeptidases and carboxypeptidases. Examples of terminal groups include an acetyl group on the N-terminus and a carboxamide group on the C-terminus.

[0620] IL-2Rβγc ligands provided by the present disclosure can comprise, for example, a moiety having the structure of Formula (6):

-BL-L-GL- (6)

where BL comprises an IL-2Rβ ligand, L comprises an IL-2Rβγc ligand linker, and GL comprises an IL-2Rγc ligand.

[0621] A moiety of Formula (6) can be terminated in small chemical moieties and can have a molecular weight, for example, less than 12,000 Da, less than 11,000 Da, less than 10,000 Da, less than 9,000 Da, less than 8,000 Da, less than 7,000 Da, or less than 6,000 Da. An IL-2Rβγc ligand can have a molecular weight, for example, from 6,000 Da to 12,000 Da, from 7,000 Da to 11,000 Da, or from 8,000 Da to 10,000 Da.

[0622] In IL-2Rβγc ligands of Formula (6), BL can comprise an IL-2Rβ ligand provided by the present disclosure such as an IL-2Rβ ligand having an amino acid sequence of any one of SEQ ID NOS: 805-903, or having an amino acid sequence having greater than 60%, greater than 70%, greater than 80%, greater than 85%, greater than 90%, or greater than 95% sequence similarity to any one SEQ ID NOS: 805-903; GL can comprise an IL-2Rγc ligand provided by the present disclosure such as an IL-2Rγc ligand having an amino acid sequence of SEQ ID NOS: 944-1028, or having an amino acid sequence having greater than 60%, greater than 70%, greater than 80%, greater than 85%, greater than 90%, or greater than 95% sequence similarity to any one of SEQ ID NOS: 944-1028; and L can comprise a peptidyl IL-2Rβγc ligand linker or a chemical IL-2Rβγc ligand linker. Examples of suitable peptidyl IL-2Rβγc ligand linkers are disclosed in FIGS. 21A-21C, and examples of suitable non-peptidyl ligand linkers are disclosed in Table 3.

[0623] In IL-2Rβγc ligands of Formula (6), either the N-terminus or the C-terminus of the IL-2Rβ ligand can be bound to the IL-2Rβγc ligand linker and either the N-terminus or the C-terminus of IL-2Rγc ligand can be bound to the IL-2Rβγc ligand linker. For example, the C-terminus of the IL-2Rβ ligand (BL) can be bound to the linker (L) and the N-terminus of the IL-2Rγc ligand (GL) can be bound to the linker (L).

[0624] In IL-2Rβγc ligands of Formula (6) each of the IL-2Rβ ligand and the IL-2Rγc ligand can independently comprise one or more flanking amino acids bound to the N-terminus and/or the C-terminus of the ligand. For example, both the N-terminus and the C-terminus of the IL-2Rβ ligand can comprise (G)ₙ (SEQ ID NO: 9379) wherein n is an integer from 1 to 10 and both the N-terminus and the C-terminus of the IL-2Rγc ligand can comprise-(G)ₙ (SEQ ID NO: 9380). The flanking amino acids can be bound to the IL-2Rβγc ligand linker.

[0625] IL-2Rβγc ligands of Formula (6) can comprise an acetyl terminal group on the N-terminus and/or a carboxamide group on the C-terminus.

[0626] An IL-2Rβγc ligand provided by the present disclosure can comprise the structure of Formula (6a):

-(A)ₙ-BL-(A)ₙ-L-(A)ₙ-GL-(A)ₙ- (6a)

[0627] where,
[0628] each n is independently an integer from 0 to 10;
[0629] BL is an IL-2Rβ ligand comprising:
   [0630] an amino acid sequence from any one of SEQ ID NOS: 805-903, 911-930, 2575-2655, 2661-2891, 2900-2926, 2929-2941, 3100-3128, 3130-3151, and 3147-3186;
   [0631] an amino acid sequence having greater than 60%, greater than 70%, greater than 80%, greater than 85%, or greater than 90% sequence identity to any one of SEQ ID NOS: 805-903, 911-930, 2575-2655, 2661-2891, 2900-2926, 2929-2941, 3100-3128, 3130-3151, and 3147-3186;
   [0632] a truncated amino acid sequence of any one of SEQ ID NOS: 805-903, 911-930, 2575-2655, 2661-2891, 2900-2926, 2929-2941, 3100-3128, 3130-3151, and 3147-3186;
[0633] or
   [0634] a combination of any of the foregoing;
[0635] GL is an IL-2Rγc ligand comprising:
   [0636] an amino acid sequence selected from any one of SEQ ID NOS: 944-1028;
   [0637] an amino acid sequence having greater than 60%, greater than 70%, greater than 80%, greater than 85%, or greater than 90% sequence identity to any one of SEQ ID NOS: 944-1028;
   [0638] a truncated amino acid sequence of any one of SEQ ID NOS: 944-1028; or
   [0639] a combination of any of the foregoing;
[0640] each A is independently selected from an amino acid; and
[0641] L is a peptidyl ligand linker comprising from 1 to 50 amino acids.

[0642] In IL-2Rβγc ligands of Formula (6a), the C-terminus of the IL-2Rβ ligand can be bound to the peptidyl ligand linker, and the N-terminus of the IL-2Rγc ligand can be bound to the peptidyl ligand linker.

[0643] In IL-2Rβγc ligands of Formula (6a) each n can independently be selected from, for example, an integer from 0 to 8, from 0 to 6, from 0 to 4, or from 0 to 2. For example, n can be 0, 1, 2, or 3. (A)ₙ represents flanking amino acids.

[0644] Each A can independently be selected from a naturally occurring or non-naturally occurring amino acid. Each A can be independently be selected from a flexible amino acid such as glycine and serine. Each A can be glycine.

[0645] L can comprise, for example, from 1 to 50 amino acids, from 1 to 40 amino acids, from 1 to 30 amino acids, from 1 to 20 amino acids, from 1 to 10 amino acids, or from 1 to 5 amino acids. Lₐ can be selected from a peptidyl ligand linker. For example, L can be a peptidyl ligand linker provided by the present disclosure such as a linker having an amino acid sequence of any one of SEQ ID NOS: 9380-9407 and 9419-9428.

[0646] L can comprise a rigid linker such as a proline rich linker having an amino acid sequence (PA)ₙ or (SEQ ID NO: 9440) or (PX)ₙ (SEQ ID NO: 9441) where n is an integer, for example, from 1 to 50, from 1 to 40, from 1 to 30, from 1 to 20, such as from 1 to 15, from 1 to 10, from 5 to 15, or from 5 to 10, and each X can be independently selected from Ala, Lys, and Glu. A rigid linker can be selected from (PA)₄ (SEQ ID NO: 9442), (PA)₅ (SEQ ID NO: 9426), (PA)₆, (SEQ ID NO: 9443) (PA)₇ (SEQ ID NO: 9427), (PA)₈ (SEQ ID NO: 9444), (PA)₉ (SEQ ID NO: 9445), (PA)₁₀ (SEQ ID NO: 9428), {PA)₁₁ (SEQ ID NO: 9446), and (PA)₁₂ (SEQ ID NO: 9447). A linker can have the structure (PA)₈ (SEQ ID NO: 9444),

[0647] Examples of IL-2Rβγc ligands having a chemical IL-2Rβγc ligand linker are listed in FIGS. 19A-19C.

[0648] Examples of IL-2Rβγc ligands having a peptidyl IL-2Rβγc ligand linker are listed in FIGS. 21A-21C.

[0649] IL-2Rβγc ligands provided by the present disclosure can comprise disulfide bonds. IL-2Rβ ligands and IL-2Rγc ligands can comprise at least two cysteines. The at least two cysteines of an IL-2Rβ ligand can be bound through disulfide bonds and each of the at least two cysteines of an IL-2Rγc ligand can be bound through a disulfide bond.

[0650] In an IL-2Rβγc ligand, two cysteines of the IL-2Rβ ligand can be bound together through a disulfide bond and/or two cysteines of the IL-2Rγc ligand can be bound together through a disulfide bond. In an IL-2Rβγc ligand a cysteine of an IL-2Rβ ligand can be bound to a cysteine of the IL-2Rγc ligand through a disulfide bond, or each of the two cysteines of an IL-2Rβ ligand can be bound to a cysteine of the IL-2Rγc ligand. For example, in an IL-2Rβγc ligand having the structure of Formula (7):

—X—C¹—X—C²—X-L-Y—C³—Y—C⁴—Y— (7)

where —X—C¹—X—C²—X— represents an amino acid sequence of an IL-2Rβ ligand having two cysteines provided by the present disclosure such as any one of SEQ ID NOS: 805-903, 911-930, 2575-2655, 2661-2891, 2900-2926, 2929-2941, 3100-3128, 3130-3151, and 3147-3186, and where each X is independently one or more amino acids, —Y—C³—Y—C⁴—Y— represents an amino acid sequence of an IL-2Rγc ligand having two cysteines such as any one of SEQ ID NOS: 944-1028 and where each Y is independently one or more amino acids, and -L- is an IL-2Rβγc ligand linker coupling the IL-2Rβ ligand and the IL-2Rγc ligand.

[0651] In an IL-2Rβγc ligand of Formula (7), C¹ can be bound to C² and C³ can be bound to C⁴ through disulfide bonds; C¹ can be bound to C³ and C² can be bound to C⁴ through disulfide bonds, or C¹ can be bound to C⁴ and C² can be bound to C³ through disulfide bonds.

[0652] An IL-2Rβγc ligand can comprise an IL-2Rβ ligand provided by the present disclosure such as an amino acid sequence selected from any one of SEQ ID NOS: 805-903, 911-930, 2575-2655, 2661-2891, 2900-2926, 2929-2941, 3100-3128, 3130-3151, and 3147-3186, a substituted amino acid sequence of an IL-2Rβ ligand of an IL-2Rβ ligand provided by the present disclosure, an amino acid sequence of an IL-2Rβ ligand provided by the present disclosure having from 1 to 5 flanking glycines (SEQ ID NO: 9430) on the N-terminus and/or the C-terminus, an amino acid sequence having greater than 60% sequence similarity to an IL-2Rβ ligand provided by the present disclosure, or a combination of any of the foregoing; and a Rγc ligand provided by the present disclosure such as an amino acid sequence selected from any one of SEQ ID NOS: 944-1028, 1032-1060, and 1601-1613, a substituted amino acid sequence of an IL-2Rγc ligand provided by the present disclosure, a truncated amino acid sequence of an IL-2Rγc ligand provided by the present disclosure, an amino acid sequence an IL-2Rγc ligand provided by the present disclosure having from 1 to 5 flanking glycines (SEQ ID NO: 9430) on the N-terminus and/or the C-terminus, an amino acid sequence having greater than 60% sequence similarity to an IL-2Rγc ligand provided by the present disclosure, or a combination of any of the foregoing.

[0653] An IL-2Rβγc ligand provided by the present disclosure can comprise an IL-2Rβ ligand having an amino acid sequence of any one of SEQ ID Nos: 865 and 9301-9314. or an amino acid sequence having greater than 60%, greater than 70%, greater than 75%, greater than 80%, greater than 85%, greater than 90%, or greater than 95% sequence similarity to any one of SEQ ID Nos: 865 and 9301-9314: and an IL-2Rγc ligand having an amino acid sequence of any one of SEQ ID NOS: 965 and 9340-9353, or an amino acid sequence having greater than 60%, greater than 70%, greater than 75%, greater than 80%, greater than 85%, greater than 90%, or greater than 95% sequence similarity to any one of SEQ ID Nos: 865 and 9301-9314.

[0654] IL-2Rβγc ligands provided by the present disclosure can comprise an IL-2Rβ ligand having SEQ ID NO: 865 or an amino acid sequence having greater than 60%, greater than 70%, greater than 75%, greater than 80%, greater than 85%, greater than 90%, or greater than 95 sequence similarity to SEQ ID NO: 865; and an IL-2Rγc ligand having SEQ ID NO: 965 or an amino acid sequence having greater than 60%, greater than 70%, greater than 75%, greater than 80%, greater than 85%, greater than 90%, or greater than 95% sequence similarity to SEQ ID NO: 965.

[0655] In IL-2Rβγc ligands the C-terminus of the IL-2Rβ ligand can be linked to the N-terminus of the IL-2Rγc ligand.

[0656] An IL-2Rβγc ligand can comprise an IL-2Rβ ligand having a truncated amino acid sequence of SEQ ID NO: 865 and an IL-2Rγc ligand having a truncated amino acid sequence SEQ ID NO: 965.

[0657] An IL-2Rβγc ligand can comprise an IL-2Rβ ligand having a substituted SEQ ID NO: 865 and an IL-2Rγc ligand having a substituted SEQ ID NO: 965, wherein the substitutions can comprise from 1 to 5 conservative amino acid substitutions or non-conservative amino acid substitutions, such as from 1 to 2 conservative amino acid substitutions or non-conservative amino acid substitutions.

[0658] Each of the IL-2Rβ ligand and the IL-2Rγc ligand can independently comprise one or more flanking amino acids such as one or more glycines. For example, each of the N-terminus and the C-terminus of the IL-2Rβ ligand and the IL-2Rγc ligand can independently comprise from 1 to 5 glycines (SEQ ID NO: 9430).

[0659] The N-terminus of the IL-2Rβ ligand can be coupled to the C-terminus of the IL-2Rγc ligand through a flexible linker comprising, for example, from 1 to 10 amino acids. The linker can be, for example, a peptidyl linker having an amino acid sequence of any one of SEQ ID NOS: 9380-9407 and 9419-9428.

[0660] An IL-2Rβγc ligand can comprise the amino acid sequence of SEQ ID NO: 1263 (-GGWYPCWMAQLGELCDLDGGGGSGGVVCQDWEGVELCWQGG-), or an amino acid sequence having greater than 60%, greater than 70%, greater than 75%, greater than 80%, greater than 85%, greater than 90%, or greater than 95% sequence similarity to SEQ ID NO: 1263.

[0661] An IL-2Rβγc ligand can comprise the amino acid sequence of SEQ ID NO: 1264 (-WYPCWMAQLGELCDLDGGGGSGGVVCQDWEGVELCWQ-) or an amino acid sequence having greater than 60%, greater than 70%, greater than 75%, greater than 80%, greater than 85%, greater than 90%, or greater than 95% sequence similarity to SEQ ID NO: 1264.

[0662] An IL-2Rβγc ligand can comprise the amino acid sequence of SEQ ID NO: 1265 (-WYPCWMAQLGELCDLDGG-X³⁰⁰-GGVVCQDWEGVELCWQ-) or can comprise an amino acid sequence having greater than 60%, greater than 70%, greater than 80%, greater than 85%, greater than 90%, or greater than 95% amino acid sequence similarity to SEQ ID NO: 1265, where X³⁰⁰ can include from 1 to 20 amino acids. For example, X³⁰⁰ can be selected from a peptidyl linker having an amino acid sequence of any one of SEQ ID NOS: 9380-9407 and 9419-9428. X³⁰⁰ can be selected such that an IL-2Rβγc ligand of any one of SEQ ID NO: 1263-1265 or an amino acid sequence having greater than 60%, greater than 70%, greater than 75%, greater than 80%, greater than 85%, greater than 90%, or greater than 95% sequence similarity to any one of SEQ ID NO: 1263-1265 is an agonist for IL-2R or a partial agonist of IL-2R.

[0663] An IL-2Rβγc ligand can comprise the amino acid sequence of SEQ ID NO: 1266 (-WYPCWMAQLGELCDLD-X³⁰⁰-VVCQDWEGVELCWQ-) or an amino acid sequence having greater 60%, greater than 70%, greater than 80%, greater than 85%, greater than 90%, or greater than 95% amino acid sequence similarity to SEQ ID NO: 1266, where ⁻X³⁰⁰ includes from 1 to 30 amino acids. ⁻X³⁰⁰ can be selected such that an IL-2Rβγc ligand of SEQ ID NO: 1266 or an amino acid sequence having greater than 60%, greater than 70%, greater than 75%, greater than 80%, greater than 85%, greater than 90%, or greater than 95% sequence similarity to SEQ ID NO: 1266 is an agonist for IL-2R or a partial agonist of IL-2R.

[0664] In IL-2Rβγc ligands of any one of SEQ ID NO: 1263-1270 or an amino acid sequence having greater than 60%, greater than 70%, greater than 75%, greater than 80%, greater than 85%, greater than 90%, or greater than 95% sequence similarity to any one of SEQ ID NO: 1263-1270, the cysteines of the IL-2Rβ ligand can be bound together through a disulfide bond, and the cysteines of the IL-2Rγc ligand can be bound together through disulfide bonds. In certain IL-2Rβγc ligands, the cysteines of the IL-2Rβ ligand can be bound to the cysteines of the IL-2Rγc ligand.

[0665] An IL-2Rβγc ligand can comprise an amino acid sequence selected from any one of SEQ ID NOS: 1263-1270, a substituted amino acid sequence of any one of SEQ ID NOS: 1263-1270, a truncated amino acid sequence of any one of SEQ ID NOS: 1263-1270 an amino acid sequence of any one of SEQ ID NOS: 1263-1270 having from 1 to 5 flanking glycines (SEQ ID NO: 9430) on the N-terminus and/or the C-terminus, an amino acid sequence having greater than 60% sequence similarity to any one of SEQ ID NOS: 1263-1270, or a combination of any of the foregoing.

SEQ ID NO: 1263
-GGWYPCWMAQLGELCDLDGGGGSGGVVCQDWEGVELCWQGG-
SEQ ID NO: 1264
-WYPCWMAQLGELCDLDGGGGSGGVVCQDWEGVELCWQ-
SEQ ID NO: 1265
-WYPCWMAQLGELCDLDGG-X³⁰⁰-GGVVCQDWEGVELCWQ-
SEQ ID NO: 1266
-WYPCWMAQLGELCDLD-X³⁰⁰-VVCQDWEGVELCWQ-
SEQ ID NO: 1267
-GWYPCWMAQLGELCDLDGGGGSGGVVCQDWEGVELCWQG-
SEQ ID NO: 1268
-GGWYPCWMAQLGELCDLDGGGGSGGVVCQDWEGVELCWQG-
SEQ ID NO: 1269
-GWYPCWMAQLGELCDLDGGGGSGGVVCQDWEGVELCWQGG-
SEQ ID NO: 1270
-(X³⁰¹)ₙ)-WYPCWMAQLGELCDLD-X³⁰⁰-VVCQDWEGVELCWQ-
(X³⁰¹)ₙ-

[0666] In an IL-2Rβγc ligand having an amino acid sequence of any one of SEQ ID NOS: 1265 and 1270, X³⁰⁰ can include from 1 to 20 amino acids. For example, X³⁰⁰ can be selected from having an amino acid sequence of any one of SEQ ID NOS: 9380-9407. For example, X³⁰⁰ can be GGS (SEQ ID NO: 9402) or GGGGSGG (SEQ ID NO: 9404). For example, X³⁰⁰ can be selected from a peptidyl linker having an amino acid sequence of any one of SEQ ID NOS: 9419-9428.

[0667] In ligands having SEQ ID NOS: 1266 and 1270, each X³⁰¹ can independently comprise a flanking amino acid such as a glycine, where each n is independently an integer from 0 to 5.

[0668] An IL-2Rβγc ligand having an amino acid sequence of any one of SEQ ID NOS: 1263-1270, the cysteines of the IL-2Rβ ligand can be bound together through a disulfide bond, and the cysteines of the Rγc ligand can be bound together through a disulfide bond. In certain IL-2Rβγc ligands, the cysteines of the IL-2Rβ ligand can be bound to the cysteines of the Rγc ligand.

[0669] An IL-2Rβγc ligand can have greater than 60%, greater than 70%, greater than 75%, greater than 80%, greater than 85%, greater than 90%, or greater than 95% sequence similarity to any one of SEQ ID NOS: 1263-1270.

[0670] An IL-2Rβγc ligand can comprise an amino acid sequence selected from any one of SEQ ID NOS: 4070-4085, a substituted amino acid sequence of any one of SEQ ID NOS: 4070-4085, a truncated amino acid sequence of any one of SEQ ID NOS: 4070-4085, an amino acid sequence of any one of SEQ ID NOS: 4070-4085 having from 1 to 5 flanking glycines (SEQ ID NO: 9430) on the N-terminus and/or the C-terminus, an amino acid sequence having greater than 60% sequence similarity to any one of SEQ ID NOS: 4070-4085, or a combination of any of the foregoing.

SEQ ID NO: 4070
GGWYPCWIARVGELCDLEEGPVNRGGGGSGGVVCQDWEGVELCWQGG
SEQ ID NO: 4071
GGAVEFYPCWLARIGELCDLVEPGGGGSGGVVCQDWEGVELCWQGG
SEQ ID NO: 4072
GGWYPCWIARVGELCDMEGGGGSGGVVCQDWEGVELCWQGG
SEQ ID NO: 4073
GGEWFHDCFLAKVGDLCDLFLWGGGGSGGVVCQDWEGVELCWQGG
SEQ ID NO: 4074
GGRYVHDCFIAQVGDLCDLFLHGGGGSGGVVCQDWEGVELCWQGG
SEQ ID NO: 4075
GGRSLVDCFLVKVGDLCDFFNWGGGGSGGVVCQDWEGVELCWQGG
SEQ ID NO: 4076
GGWYPCWIARVGELCDLEGGGGSGGVVCQDWEGVELCWQGG
SEQ ID NO: 4077
GGWYPCWLAQVGELCDLDGGGGSGGVVCQDWEGVELCWQGG
SEQ ID NO: 4078
GGWYPCWIARVGELCDLEEGPVNRGGGGSGGGGSGGVVCQDWEGVELC
WQGG
SEQ ID NO: 4079
GGWYPCWIARVGELCDLEEGPVNRGGGGSGGGGSGGGGSGGVVCQDWE
GVELCWQGG
SEQ ID NO: 4080
GGRYVHDCFIAQVGDLCDLFLHGGGGSGGGGSGGVVCQDWEGVELCWQ
GG
SEQ ID NO: 4081
GGRYVHDCFIAQVGDLCDLFLHGGGGSGGGGSGGGGSGGVVCQDWEGV
ELCWQGG
SEQ ID NO: 4082
GGRYVHDCFIAQVGDLCDLFLHGGGGSGGGGSGGGGSGGGGSGGVVCQ
DWEGVELCWQGG
SEQ ID NO: 4083
GGLVDCFKVKVGELCDLFGGGGSGGVVCQDWEGVELCWQGG
SEQ ID NO: 4084
GGRYVHDCFIAQVGDLCDLFLHGGGGSGGVVCQDWEGVELCWQGG
SEQ ID NO: 4085
GGWYSCWMAQLGELCDLDGGGGSGGVVCQDWEGVELCWQGG

[0671] An IL-2Rβγc ligand having an amino acid sequence of any one of SEQ ID NOS: 4070-4085, the cysteines of the IL-2Rβ ligand can be bound together through a disulfide bond, and the cysteines of the Rγc ligand can be bound together through a disulfide bond. In certain IL-2Rβγc ligands, the cysteines of the IL-2Rβ ligand can be bound to the cysteines of the Rγc ligand.

[0672] An IL-2Rβγc ligand can have greater than 60%, greater than 70%, greater than 75%, greater than 80%, greater than 85%, greater than 90%, or greater than 95% sequence similarity to any one of SEQ ID NOS: 4070-4085.

[0673] In IL-2Rβγc ligand having SEQ ID NOS: 4070-4085 the ligand linker can be another ligand linker such as any of those disclosed herein.

[0674] An IL-2Rβγc ligand can have the amino acid sequence of any one of SEQ ID NOS: 1264 and 4091-4094.

SEQ ID NO: 1264
WYPCWMAQLGELCDLDGGGGSGGVVCQDWEGVELCWQ
SEQ ID NO: 4091
WYPCWMAQLGELCDLDGGGGSGGVVCQDWEGVALCWQ
SEQ ID NO: 4092
WYPCW(Abu)AQLGELCDLDGGGGSGGVVCQDWEGVELCWQ
SEQ ID NO: 4093
WYPCW(Abu)AQLGELCDLDGGGGSGGVVCQDWEGVALCWQ
SEQ ID NO: 4094
WYPCWMAQLGELCDLDGGGGSGGVVCQDWEGVELCWQ

[0675] An IL-2Rβγc ligand having the amino acid sequence of any one of SEQ ID NOS: 1264 and 4091-4094 can bind the hu-IL-2Rβ and hu-IL-2Rγc subunits with an IC50 of less than 100 μM.

[0676] An IL IL-2Rβγc ligand can have the amino acid sequence of any one of SEQ ID NOS: 4095-4099.

SEQ ID NO: 4095
GGELLVDCFKVKVGELCDLFFGGGGGSGGVVCQDWEGVELCWQGG
SEQ ID NO: 4096
GGRYVHDCFIAQVGDLCDLFLHGGGGSGGVVCQDWEGVELCWQGG
SEQ ID NO: 4097
GGKWVHDCFLAKVGDVCDLFVVGGGGSGGVVCQDWEGVELCWQGG
SEQ ID NO: 4098
GGRSLVDCFLVKVGDLCDFFNWGGGGSGGVVCQDWEGVELCWQGG
SEQ ID NO: 4099
GGEWFHDCFLAKVGDLCDLFLWGGGGSGGVVCQDWEGVELCWQGG

[0677] An IL-2Rβγc ligand having the amino acid sequence of any one of SEQ ID NOS: 4095-4099 can bind the hu-IL-2Rβ subunit and to the hu-IL-2Rγc subunit with an IC50 of less than 100 μM.

[0678] Certain IL-2Rβγc ligands having an amino acid sequence of any one of SEQ ID NOS: 1263-1270, 4070-4085, and 4090-4099 can bind the hu-IL-2Rβ subunit, to the hu-IL-2Rγc subunit, to the cyno-IL-2Rβ subunit, and to the cyno-IL-2Rγc subunit with an IC50 of less than 100 μM.

[0679] An IL-2Rβγc ligand provided by the present disclosure can bind to IL-2R such as human IL-2R with an IC₅₀ from 1 pM to 100 μM, from 10 pM to 10 μM, from 100 pM to 1 μM, from 0.001 μM to 1 μM, or from 0.01 μM to 1 μM.

[0680] An IL-2Rβγc ligand provided by the present disclosure can bind to IL-2R such as human IL-2R with an IC₅₀ of less than 100 μM, less than 10 μm, less than 1 μm, less than 100 pM, less than 10 pM, or less than 1 pM.

[0681] An IL-2Rβγc ligand provided by the present disclosure can bind to each of the IL-2Rβ subunit and to the IL-2Rγc subunit, such as each of the human IL-2Rβ subunit and the human IL-2Rγc subunit, with an IC₅₀ from 1 pM to 100 μM, from 10 pM to 10 μM, from 100 pM to 1 μM, from 0.001 μM to 1 μM, or from 0.01 μM to 1 μM.

[0682] An IL-2Rβγc ligand provided by the present disclosure can bind to each of the IL-2Rβ subunit and the IL-2Rγc subunit, such as each of the human IL-2Rβ subunit and to the human IL-2Rγc subunit with an IC₅₀ of less than 100 μm, less than 10 μm, less than 1 μm, less than 100 pM, less than 10 pM, or less than 1 pM.

[0683] An IL-2Rγc ligand provided by the present disclosure can exhibit an EC₅₀ for STAT5 phosphorylation in TF-1β cells and/or NK-92 cells, for example, of less than 100 μM, less than 10 μM, less than 1 μM, less than 100 pM, less than 10 pM, or less than 1 pM.

[0684] An IL-2Rγc ligand provided by the present disclosure can exhibit an EC₅₀ for STAT5 phosphorylation in TF-1β cells and/or NK-92 cells, for example, from 1 pM to 100 μM, from 10 pM to 10 μM, from 100 pM to 1 μM, from 0.001 μM to 1 μM, or from 0.01 μM to 1 μM.

[0685] Solid tumors exhibit metabolic differences from normal tissues. The greater reliance of solid tumors on glycolytic metabolism, produces a more acidic tumor microenvironment. For example, the solid tumor microenvironment can have a pH that is from 1 pH to 2 pH units less than that of most normal tissue. This pH differential can be exploited to enhance the activity of therapeutic agents in solid tumors relative to activity in normal peripheral tissue.

[0686] Using suitable pH-selective screening methods, IL-2Rβ and IL-2Rγc ligands can be identified that bind to IL-2R at low pH with an IC₅₀ that is less than the IC₅₀ for binding at a neutral pH. For example, the IC₅₀ for binding at a pH less than 6 can be at least 10 time or at least 100 times less than the IC₅₀ for binding at a pH greater than 6. These pH-biased IL-2Rβ and/or IL-2Rγc ligands can be incorporated into an IL-2Rβγc ligand to provide a pH-biased IL-2Rβγc ligand.

[0687] IL-2Rβγc ligands can comprise a pH-biased IL-2Rβ ligand and/or a pH-biased IL-2Rγc ligand. These pH-biased IL-2Rβγc ligands can exhibit an enhanced therapeutic index with respect to increased cytotoxicity targeting solid tumors and with reduced toxicity to normal tissue.

[0688] An IL-2Rβγc ligand comprising a pH-biased IL-2Rβ ligand and/or a pH-biased IL-2Rβγc ligand can exhibit a pH-biased binding affinity (IC₅₀) to the IL-2Rβ subunit and/or to the IL-2Rγc subunit.

[0689] For example, a pH-biased IL-2Rβγc ligand can bind to IL-2R, such as human IL-2R, at pH 6 with an IC₅₀ at least at least 10% less than the IC₅₀ for binding to IL-2R, such as human IL-2R, at pH 7.5, at least 25% less, at least 50% less, at least 100% less, or at least 200% less than the IC₅₀ for binding to IL-2R, such as human IL-2R, at pH 7.5.

[0690] A pH-biased IL-2Rβγc ligand can bind to IL-2R, such as human IL-2R, at pH 6.0 with an IC₅₀ from 1 pM to 100 μM; and bind to IL-2R, such as human IL-2R, with an IC₅₀ greater than 100 μM at pH 7.5.

[0691] A pH-biased IL-2Rβγc ligand can bind to IL-2Rγc, such as human IL-2Rγc, at pH 6.0 with an IC₅₀ from 0.1 μM to 50 μM; and bind to IL-2Rγc, such as human IL-2Rγc with an IC₅₀ greater than 100 μM at pH 7.5.

[0692] A pH-biased IL-2Rβγc ligand can bind to IL-2Rγc, such as human IL-2Rβγc at pH 6.0 with an IC₅₀ of less than 100 μM; and bind to IL-2Rγc, such as human IL-2Rγc with an IC₅₀ greater than 100 μM at pH 7.5.

[0693] A pH-biased IL-2Rβγc ligand can bind to each of the IL-2Rβ subunit and to the IL-2Rγc subunit, such as the human IL-2Rβ subunit and the IL-2Rγc subunit, with an IC₅₀ of less than 100 μM at pH 6, and bind to each of the IL-2Rβ subunit and to the IL-2Rγc subunit, such as the human IL-2Rβ subunit and the IL-2Rγc subunit, with an IC₅₀ greater than 100 μM at pH 7.5.

[0694] pH-Biased IL-2Rβγc ligands can be useful, for example, to selectively activate cell expressing IL-2R in low pH cell environments such as in solid tumors compared to cells in neutral and high pH environments.

[0695] Using suitable pH-selective screening methods, pH-biased IL-2Rβγc ligands can be identified that have a higher binding affinity (lower IC₅₀) to IL-2R at lower pH and a lower binding affinity (higher IC₅₀) at a neutral pH. IL-2Rβγc ligands, tandem IL-2Rγc ligands, and IL-2Rβγc ligand constructs can include one or more pH-biased IL-2Rβ ligands and/or one or more pH-biased IL-2Rγc ligands. These pH-biased IL-2Rβγc ligands, pH-biased tandem IL-2Rβγc ligands, and pH-biased IL-2Rβγc ligand constructs can exhibit an enhanced therapeutic index reflecting increased cytotoxicity for targeting solid tumors and with reduced toxicity to normal tissue.

[0696] Similarly, using pH-selective functional screening methods IL-2Rβγc ligands and IL-2Rβγc ligand constructs can be selected that exhibit enhanced IL-2R agonist activity a lower pH such as at pH 6 compared to higher pH such as at pH 7. For example, pH-biased IL-2Rβγc ligands provided by the present disclosure can provide a lower EC₅₀ for STAT5 phosphorylation in TF-1β cells and/or NK-92 cells at pH 6.0 relative to the EC₅₀ for the same IL-2Rβγc ligand at pH 7.5. Such pH-biased IL-2Rβγc ligands exhibit enhanced IL-2R agonist activity or partial agonist activity at lower pH.

[0697] For example, a pH-biased IL-2Rβγc ligand can exhibit an EC₅₀ for STAT5 phosphorylation in TF-1β and NK-92 cells at pH 6 that is at least at least 10% less than the EC₅₀ for STAT5 phosphorylation in TF-1β and NK-92 cells at pH 7.5, at least 25% less, at least 50% less, at least 100% less, or at least 200% less than the EC₅₀ for STAT5 phosphorylation in TF-1β and NK-92 cells at pH 7.5.

[0698] Using pH-selective screening methods similar to those described in the examples, pH-biased IL-2Rβ ligands and/or IL-2Rγc ligands having other pH biases, such as other pH-biased functional properties or decreased IC₅₀ or EC₅₀ at pH values greater than normal healthy tissue, can be identified and incorporated into IL-2Rβγc ligands to provide additional biased IL-2Rβγc ligands and IL-2Rβγc ligand constructs.

[0699] An IL-2Rβγc ligand provided by the present disclosure can comprise an amino acid sequence of any one of SEQ ID NOS: 4100-4137.

-(G)ₙ-BL-(G)ₙ-X¹⁰⁰-(G)ₙ-GL-(G)ₙ-
-(G)ₙ-BL-(G)ₙ-(PA)n-(G)ₙ-GL-(G)ₙ-
SEQ ID NO: 4102
-(G)ₙ-BL-(G)ₙ-(PA)8-(G)ₙ-GL-(G)ₙ-
SEQ ID NO: 4103
-(G)ₙ-BL-(G)+nd n-X¹⁰⁰-(G)ₙ-VVCQDWEGVELCWQ-(G)ₙ-
SEQ ID NO: 4104
-(G)ₙ-ELLVDCFKVKVGELCDLFF-(G)ₙ-X¹⁰⁰-(G)ₙ-GL-(G)ₙ-
SEQ ID NOS 4105 and 9452
-(G)ₙ-ELLVDCFKVKVGELCDLFF-(G)ₙ-X¹⁰⁰-(G)ₙ-
VVCQDWEGVELCWQ-(G)ₙ-
SEQ ID NO: 4106
-(G)ₙ-ELLVDCFKVKVGELCDLFF-(G)ₙ-(PA)ₙ-
(G)ₙ-VVCQDWEGVELCWQ-(G)ₙ-
SEQ ID NO: 4107
-(G)ₙ-ELLVDCFKVKVGELCDLFF-(G)ₙ-(PA)₈-(G)ₙ-
VVCQDWEGVELCWQ-(G)ₙ-
SEQ ID NO: 4108
-(G)ₙ-ELLVDCFKVKVGELCDLFF-G-(PA)ₙ-G-
VVCQDWEGVELCWQ-(G)ₙ-
SEQ ID NO: 4109
-(G)ₙ-ELLVDCFKVKVGELCDLFF-(PA)ₙ-G-
VVCQDWEGVELCWQ-(G)ₙ-
SEQ ID NO: 4110
-(G)ₙ-ELLVDCFKVKVGELCDLFF-G-(PA)ₙ-
VVCQDWEGVELCWQ-(G)ₙ-
SEQ ID NO: 4111
-(G)ₙ-ELLVDCFKVKVGELCDLFF-(PA)ₙ-
VVCQDWEGVELCWQ-(G)ₙ-
SEQ ID NO: 4112
ELLVDCFKVKVGELCDLFF-G-(PA)ₙ-G-VVCQDWEGVELCWQ
SEQ ID NO: 4113
ELLVDCFKVKVGELCDLFF-G-(PA)ₙ-G-VVCQDWEGVELCWQG
SEQ ID NO: 4114
ELLVDCFKVKVGELCDLFF-G-(PA)ₙ-G-VVCQDWEGVELCWQGG
SEQ ID NO: 4115
GELLVDCFKVKVGELCDLFF-G-(PA)ₙ-G-VVCQDWEGVELCWQ
SEQ ID NO: 4116
GGELLVDCFKVKVGELCDLFF-G-(PA)ₙ-G-VVCQDWEGVELCWQ
SEQ ID NO: 4117
GGGELLVDCFKVKVGELCDLFF-G-(PA)ₙ-G-VVCQDWEGVELCWQ
SEQ ID NO: 4118
GGGELLVDCFKVKVGELCDLFF-G-(PA)ₙ-G-VVCQDWEGVELCWQ
GG
SEQ ID NO: 4119
GGGELLVDCFKVKVGELCDLFF-G-(PA)₈-G-
VVCQDWEGVELCWQGG-(G)ₙ-BL-(G)ₙ-X100-(G)ₙ-GL-(G)ₙ-
SEQ ID NO: 4121
-(G)ₙBL-(G)ₙ-X100-(G)ₙ-VVCQDWEGVELCWQ-(G)ₙ-
SEQ ID NO: 4122
-(G)ₙ-RYVHDCFIAQVGDLCDLFLH-(G)ₙ-X100-
(G)ₙ-GL-(G)ₙ-
SEQ ID NOS 4123 and 9453
-(G)ₙ-RYVHDCFIAQVGDLCDLFLH-(G)ₙ-X100-(G)ₙ-
VVCQDWEGVELCWQ-(G)ₙ-
SEQ ID NO: 4124
-(G)ₙ-RYVHDCFIAQVGDLCDLFLH-(G)ₙ-(PA)ₙ-(G)ₙ-
VVCQDWEGVELCWQ-(G)ₙ-
SEQ ID NO: 4125
-(G)ₙ-RYVHDCFIAQVGDLCDLFLH-(G)ₙ-(PA)₈-(G)ₙ-
VVCQDWEGVELCWQ-(G)ₙ-
SEQ ID NO: 4126
-(G)ₙ-RYVHDCFIAQVGDLCDLFLH-G-(PA)ₙ-G-
VVCQDWEGVELCWQ-(G)ₙ-
SEQ ID NO: 4127
-(G)ₙ-RYVHDCFIAQVGDLCDLFLH-(PA)ₙ-G-
VVCQDWEGVELCWQ-(G)ₙ-
SEQ ID NO: 4128
-(G)ₙ-RYVHDCFIAQVGDLCDLFLH-G-(PA)ₙ-
VVCQDWEGVELCWQ-(G)ₙ-
SEQ ID NO: 4129
-(G)ₙ-RYVHDCFIAQVGDLCDLFLH-(PA)ₙ-
VVCQDWEGVELCWQ-(G)ₙ-
SEQ ID NO: 4130
-(G)ₙ-RYVHDCFIAQVGDLCDLFLH-GG-(PA)ₙ-G-
VVCQDWEGVELCWQ-(G)ₙ-
SEQ ID NO: 4131
RYVHDCFIAQVGDLCDLFLH-(PA)ₙ-G-VVCQDWEGVELCWQ
SEQ ID NO: 4132
RYVHDCFIAQVGDLCDLFLH-(PA)ₙ-G-VVCQDWEGVELCWQG
SEQ ID NO: 4133
RYVHDCFIAQVGDLCDLFLH-(PA)ₙ-G-VVCQDWEGVELCWQGG
SEQ ID NO: 4134
GRYVHDCFIAQVGDLCDLFLH-(PA)ₙ-G-VVCQDWEGVELCWQ
SEQ ID NO: 4135
GGRYVHDCFIAQVGDLCDLFLH-(PA)ₙ-G-VVCQDWEGVELCWQ
SEQ ID NO: 4136
GGRYVHDCFIAQVGDLCDLFLH-(PA)ₙ-G-VVCQDWEGVELCWQGG
SEQ ID NO: 4137
GGRYVHDCFIAQVGDLCDLFLH-(PA)₈-G-VVCQDWEGVELCWQGG

[0700] In an IL-2Rβγc ligand of any one of SEQ ID NOS: 4100, 4103, 4104, 4105, and 4120-4123, X¹⁰⁰ can be selected from a ligand linker as disclosed herein, and (G)n and (PA)n are defined herein. For example, X¹⁰⁰ can be a rigid ligand linker such as (P)n (SEQ ID NO: 9420) or (PA)n (SEQ ID NO: 9421) where n is an integer from 1 to 20.

[0701] An IL-2Rβγc ligand having an amino acid sequence of any one of SEQ ID NOS: 4100-4137 can have, for example, from 1 to 10 amino acid substitutions.

[0702] In IL-2Rβγc ligand can have, for example, greater than 60%, greater than 70%, greater than 80%, or greater than 90% sequence similarity to an amino acid sequence of any one of SEQ ID NOS: 4100-4137.

[0703] An IL-2Rβγc ligand provided by the present disclosure can comprise an amino acid sequence of any one of SEQ ID NOS: 4160-4168.

SEQ ID NO: 4160
WYPCWMAQLGELCDLDGGGGSGGVVCQDWEGVELCWQ
SEQ ID NO: 4161
WYPCWMAQLGELCDLDGGGGSGGVVCQDWEGVALCWQ
SEQ ID NO: 4162
WYPCW(Abu)AQLGELCDLDGGGGSGGVVCQDWEGVELCWQ
SEQ ID NO: 4163
WYPCW(Abu)AQLGELCDLDGGGGSGGVVCQDWEGVALCWQ
SEQ ID NO: 4164
GGELLVDCFKVKVGELCDLFFGGGGGSGGVVCQDWEGVELCWQGG
SEQ ID NO: 4165
GGRYVHDCFIAQVGDLCDLFLHGGGGSGGVVCQDWEGVELCWQGG
SEQ ID NO: 4166
GGKWVHDCFLAKVGDVCDLFVVGGGGSGGVVCQDWEGVELCWQGG
SEQ ID NO: 4167
GGRSLVDCFLVKVGDLCDFFNWGGGGSGGVVCQDWEGVELCWQGG
SEQ ID NO: 4168
GGEWFHDCFLAKVGDLCDLFLWGGGGSGGVVCQDWEGVELCWQGG

[0704] An IL-2Rβγc ligand having an amino acid sequence of any one of SEQ ID NOS: 4160-4168 can have, for example, from 1 to 10 amino acid substitutions.

[0705] In IL-2Rβγc ligand can have, for example, greater than 60%, greater than 70%, greater than 80%, or greater than 90% sequence similarity to an amino acid sequence of any one of SEQ ID NOS: 4160-4168.

[0706] An IL-2Rβγc ligand provided by the present disclosure can comprise an amino acid sequence of any one of SEQ ID NOS: 4170-4185.

SEQ ID NO: 4170
GGGELLVDCFKVKVGELCDLFFG(GGGGS)₄GGVVCQDWEGVELCW
QGG
SEQ ID NO: 4171
GGGELLVDCFKVKVGELCDLFFG(PA)8GVVCQDWEGVELCWQGG
SEQ ID NO: 4172
WYPCWIARVGELCDLEEGPVNRGGGGGSGGVVCQDWEGVELCWQGG
SEQ ID NO: 4173
GGGELLVDCFKVKVGELCDLFFG(GGGGS)₂GGVVCQDWEGVELCWQ
GG
SEQ ID NO: 4174
GGGELLVDCFKVKVGELCDLFFG(GGGGS)₃GGVVCQDWEGVELCWQ
GG
SEQ ID NO: 4175
GGRYVHDCFIAQVGDLCDLFLH(GGGGS)₄GGVVCQDWEGVELCWQ
GG
SEQ ID NO: 4176
GGRYVHDCFIAQVGDLCDLFLH(PA)₈GVVCQDWEGVELCWQGG
SEQ ID NO: 4177
GGELLVDCFKVKVGELCDLFFG(PA)₁₁VVCQDWEGVELCWQGG
SEQ ID NO: 4178
GGELLVDCFKVKVGELCDLFFG(PA)8GVVCQDWEGVELCWQGG
SEQ ID NO: 4179
LVDCFKVKVGELCDLFFG(PA)8GVVCQDWEGVELCWQ
SEQ ID NO: 4180
VDCFKVKVGELCDLFFG(PA)8GVVCQDWEGVELCWQ
SEQ ID NO: 4181
GGELLVDCFRVRVGELCDLFFG(PA)8GVVCQDWEGVELCWQGG
SEQ ID NO: 4182
GGRYVHDCFIAQVGDLCALFLH(PA)8GVVCQDWEGVELCWQGG
SEQ ID NO: 4183
GGRYVHDCFIAQAGDLCDLFLH(PA)8GVVCQDWEGVELCWQGG
SEQ ID NO: 4184
GGRYVHDCFIAQVGDACDLFLH(PA)8GVVCQDWEGVELCWQGG
SEQ ID NO: 4185
GGRYVHDCFIGQVGDLCDLFLH(PA)8GVVCQDWEGVELCWQGG

[0707] An IL-2Rβγc ligand having an amino acid sequence of any one of SEQ ID NOS: 4170-4185 can have, for example, from 1 to 10 amino acid substitutions, such as from 1 to 5 amino acid substitutions.

[0708] In IL-2Rβγc ligand can have, for example, greater than 60%, greater than 70%, greater than 80%, or greater than 90% sequence similarity to an amino acid sequence of any one of SEQ ID NOS: 4170-4185.

[0709] An IL-2Rβγc ligand can be synthesized by combining an IL-2Rβ ligand and an IL-2Rγc ligand using click chemistry. Examples of IL-2Rβγc ligands synthesized using click chemistry in include ligands synthesized using click chemistry having the structures BGL22, BGL23, or BGL24.

BGL22
(SEQ ID NOS 9448-9449)
GGRYVHDCFIAQVGALCDLFLH(PA)8-(L11)-VVCQDWEGVELCWQ
GG
BGL23
(SEQ ID NOS 9450 and 9449)
GGRYVHACFIAQVGDLCDLFLH(PA)8-(L11)-VVCQDWEGVELCWQ
GG
BGL24
(SEQ ID NOS 9451 and 9449)
GGRYVHDCFIAQVGDLCDLALH(PA)8-(L11)-VVCQDWEGVELCWQ
GG

[0710] In the IL-2Rβγc ligands BGL22-BGL24 each of the IL-2Rβ ligand and the IL-2Rγc ligand can independently have, for example, from 1 to 5 such as 1, 2, 3, 4, or 5 amino acid substitutions. The structure of non-peptidyl linker (L11) is shown in Table 3.

[0711] In the IL-2Rβγc ligands BGL22-BGL24 each of the IL-2Rβ ligand and the IL-2Rγc ligand can independently have greater than 60%, greater than 70%, greater than 80% or greater than 90% sequence similarity to the ligand sequences of IL-2Rβγc ligands BGL22-BGL24.

[0712] An IL-2Rβγc ligand having an amino acid sequence of any of SEQ ID NOS: 4100-4137, 4160-4168, and 4170-4178 or having the structures of BGL22-BGL24 can bind to the hu-IL-2Rβ subunit and to the hu-IL-2Rγc subunit with an IC50 less than 100 μM, less than 10 μM, less than 1 μM, or less than 100 nM.

[0713] An IL-2Rβγc ligand having an amino acid sequence of any of SEQ ID NOS: 4100-4137, 4160-4168, and 4170-4178 or having the structures of BGL22-BGL24 can bind to the cyno-IL-2Rβ subunit and to the cyno-IL-2Rγc subunit with an IC50 less than 100 μM, less than 10 μM, less than 1 μM, or less than 100 nM.

[0714] An IL-2Rβγc ligand having an amino acid sequence of any of SEQ ID NOS: 4100-4137, 4160-4168, and 4170-4178 or having the structures of BGL22-BGL24 can bind to the hu-IL-2Rβ subunit, to the cyno-IL-2Rβ subunit, the hu-IL-2Rγc subunit, and the cyno-IL-2Rγc subunit with an IC50 less than 100 μM, less than 10 μM, less than 1 μM, or less than 100 nM.

[0715] An IL-2Rβγc ligand having an amino acid sequence of any of SEQ ID NOS: 4100-4137, 4160-4168, and 4170-4178 or having the structures of BGL22-BGL24 can bind to hu-IL-2R and to cyno-IL-2R with an IC50 less than 100 μM, less than 10 μM, less than 1 μM, or less than 100 nM.

[0716] An IL-2Rβγc ligand having an amino acid sequence of any of SEQ ID NOS: 4100-4137, 4160-4168, and 4170-4178 or having the structures of BGL22-BGL24 can activate hu-IL-2R and cyno-IL-2R with an EC50 less than 100 μM, less than 10 μM, less than 1 μM, or less than 100 nM, as determined using a STAT5 phosphorylation assay as described in the Examples.

[0717] An IL-2Rβγc ligand having an amino acid sequence of any of SEQ ID NOS: 4100-4137, 4160-4168, and 4170-4178 or having the structures of BGL22-BGL24 can bind to the specific IL-2R binding site with an IC50 less than 100 μM, such as less than 10 μM, or less than 1 μM.

[0718] An IL-2Rβγc ligand provided by the present disclosure can comprise a hu/cyno-IL-2Rβγc ligand that binds to both hu-IL-2R and cyno-IL-2R with an IC50 less than 100 μM, less than 10 μM, less than 1 μM, or less than 100 nM, The hu/cyno-IL-2Rβγc ligand can comprises an IL-2Rβ ligand that binds to both the hu-IL-2Rβ subunit and to the cyno-IL-2Rγc subunit with an IC 50 less than 100 μM, and an IL-2Rγc ligand that binds to both the hu-IL-2Rβ subunit and the cyno-IL-2Rγc subunit with an IC50 less than 100 μM.

[0719] An IL-2Rβ ligand that binds to both the hu-IL-2Rβ subunit and to the cyno-IL-2Rβ subunit with an IC50 less than 1 μM is referred to as a hu/cyno-IL-2Rβ ligand.

[0720] Examples of hu/cyno-IL-2Rβγc ligands include peptides having an amino acid sequence of SEQ ID NOS: 2661-2891, 2900-2986, 2100-3128, 3130-3151, and 3147-3186.

[0721] A hu/cyno-IL-2Rβγc ligand provided by the present disclosure can be an agonist or partial agonist for both hu-IL-2R and cyno-IL-2R as determined using a STAT5 phosphorylation assay described in the Examples. For example, a hu/cyno-IL-2Rβγc ligand can exhibit an EC50 less than 100 μM, less than 10 μM, less than 1 μM, or less than 100 nM for hu-IL-2R and cyno-IL-2R activation, as determined using a STAT5 phosphorylation assay as described in the Examples.

[0722] A hu-IL-2Rβγc ligand provided by the present disclosure can comprise the IL-2Rβ ligand and the IL-2Rγc ligand in which both ligands bind to the respective hu-IL-2R subunits with an IC50 less than 100 μM, less than 10 μM, less than 1 μM, less than 100 nM.

[0723] A hu-IL-2Rβγc ligand provided by the present disclosure can comprise the IL-2Rβ ligand and the IL-2Rγc ligand in which both ligands bind to hu-IL-2R with an IC50 less than 100 μM, less than 10 μM, less than 1 μM, or less than 100 nM.

[0724] A hu/cyno-IL-2Rβγc ligand provided by the present disclosure can comprise the IL-2Rβ ligand and the IL-2Rγc ligand in which both ligands bind to the respective hu-IL-2R subunits and cyno-IL-2R subunits with an IC50 less than 100 μM, less than 10 μM, less than 1 μM, or less than 100 nM.

[0725] An IL-2Rβγc ligand such as an IL-2Rβγc ligand provided by the present disclosure can comprise an IL-2Rβ ligand and an IL-2Rγc ligand wherein the ligands bind to the respective IL-2R subunits and/or to IL-2R with a similar IC50.

[0726] For example, in an IL-2Rβγc ligand such as an IL-2Rβγc ligand provided by the present disclosure, the IL-2R subunit binding ratio can be from 0.1 to 10 or from 0.3 to 3. The IL-2R subunit binding ratio is the ratio of the IC50 for the binding of the IL-2Rβ ligand to the hu-IL-2Rβ subunit to the IC50 for the binding of the IL-2Rγc ligand to hu-IL-2Rγc subunit.

[0727] For example, in an IL-2Rβγc ligand such as an IL-2Rβγc ligand provided by the present disclosure, the IL-2Rβ ligand can bind to the hu-IL-2Rβ subunit with an IC50 of 1 μM and the IL-2Rγc ligand can bind to the hu-IL-2Rγc subunit with an IC50 of 1 μM, and the hu-IL-2R subunit binding ratio is 1.

[0728] In an IL-2Rβγc ligand such as an IL-2Rβγc ligand provided by the present disclosure, the IL-2R binding ratio can be, for example, from 0.1 to 10 or from 0.3 to 3. The hu-IL-2R binding ratio is the ratio of the IC50 for the binding of the IL-2Rβ ligand to hu-IL-2R to the IC50 for the binding of the IL-2Rγc ligand to hu-IL-2R.

[0729] For example, in an IL-2Rβγc ligand such as an IL-2Rβγc ligand provided by the present disclosure, the IL-2Rβ ligand can bind to hu-IL-2R with an IC50 of 1 μM and the IL-2Rγc subunit can bind to hu-IL-2R with an IC50 of 1 μM, and the hu-IL-2R binding ratio is 1.

[0730] An IL-2Rβγc binding compound such as an IL-2Rβγc binding compound provided by the present disclosure can comprise an IL-2Rβ ligand and an IL-2Rγc ligand where the ligands can bind to the respective IL-2R subunits and/or to IL-2R with a different IC50.

[0731] For example, in an IL-2Rβγc binding compound such as an IL-2Rβγc binding compound provided by the present disclosure, the hu-IL-2R subunit binding ratio can be from 10,000 to 0.0001, from 10,000 to 0.001, from 3,000 to 0.001, from 1,000 to 0.001, from 300 to 0.003, from 100 to 0.01, or from 30 to 0.03.

[0732] For example, in an IL-2Rβγc binding compound such as an IL-2Rβγc binding compound provided by the present disclosure, the hu-IL-2R subunit binding ratio can be less than 10,000, less than 3,000, less than 1,000, less than 300, less than 100, less than 30, less than 10, less than 3, less than 1, less than 0.3, less than 0.1, less than 0.03, less than 0.01, less than 0.003, less than 0.001, or less than 0.0003.

[0733] For example, in an IL-2Rβγc binding compound such as an IL-2Rβγc binding compound provided by the present disclosure, the hu-IL-2R subunit binding ratio can be greater than 0.0001, greater than 0.0003, greater than 0.001, greater than 0.003, greater than 0.01, greater than 0.03, greater than 0.1, greater than 0.3, greater than 1, greater than 3, greater than 10, greater than 30, greater than 100, greater than 300, greater than 1,000, or greater than 3,000.

[0734] For example, in an IL-2Rβγc binding compound such as an IL-2Rβγc binding compound provided by the present disclosure, the hu-IL-2R binding ratio can be from 10,000 to 0.0001, from 10,000 to 0.001, from 3,000 to 0.001, from 1000 to 0.001, from 300 to 0.003, from 100 to 0.01, or from 30 to 0.03.

[0735] For example, in an IL-2Rβγc binding compound such as an IL-2Rβγc binding compound provided by the present disclosure, the hu-IL-2R binding ratio can be less than 10,000, less than 3,000, less than 1,000, less than 300, less than 100, less than 30, less than 10, less than 3, less than 1, less than 0.3, less than 0.1, less than 0.03, less than 0.01, less than 0.003, less than 0.001, or less than 0.0003.

[0736] For example, in an IL-2Rβγc binding compound such as an IL-2Rβγc binding compound provided by the present disclosure, the hu-IL-2R binding ratio can be greater than 0.0001, greater than 0.0003, greater than 0.001, greater than 0.003, greater than 0.01, greater than 0.03, greater than 0.1, greater than 0.3, greater than 1, greater than 3, greater than 10, greater than 30, greater than 100, greater than 300, greater than 1,000, or greater than 3,000.

[0737] In an IL-2Rβγc binding compound such as an IL-2Rβγc binding compound provided by the present disclosure, a hu-IL-2R subunit binding ratio can be, for example, from 10 to 10,000, from 10 to 3,000, from 10 to 1,000 or from 30 to 300. In an IL-2Rβγc binding compound such as an IL-2Rβγc binding compound provided by the present disclosure, a hu-IL-2R subunit binding ratio can be, for example, greater than 10, greater than 30, greater than 100, greater than 300, greater than 1,000, of greater than 3,000. In an IL-2Rβγc ligand provided by the present disclosure, a hu-IL-2R subunit binding ratio can be, for example, less than 10,000, less than 3,000, less than 1,000, less than 300, less than 100, or less than 30.

[0738] In an IL-2Rβγc binding compound such as an IL-2Rβγc binding compound provided by the present disclosure, a hu-IL-2R subunit binding ratio can be, for example, from 0.1 to 0.0001, from 0.1 to 0.0003, from 0.1 to 0.001 or from 0.03 to 0.003. In an IL-2Rβγc binding compound such as an IL-2Rβγc binding compound provided by the present disclosure, a hu-IL-2R subunit binding ratio can be, for example, greater than 0.0001, greater than 0.0003, greater than 0.001, greater than 0.003, greater than 0.01, or greater than 0.03. In an IL-2Rβγc binding compound such as an IL-2Rβγc binding compound provided by the present disclosure, a hu-IL-2R subunit binding ratio can be, for example, less than 0.1, less than 0.03, less than 0.01, less than 0.003, less than 0.001, or less than 0.0003.

[0739] In an IL-2Rβγc binding compound such as an IL-2Rβγc binding compound provided by the present disclosure, a hu-IL-2R subunit binding ratio can be, for example, from 0.1 to 10 or from 0.3 to 3. In an IL-2Rβγc binding compound such as an IL-2Rβγc binding compound provided by the present disclosure, a hu-IL-2R subunit binding ratio can be, for example, greater than 0.1, greater than 0.3, greater than 1, or greater than 3. In an IL-2Rβγc binding compound such as an IL-2Rβγc binding compound provided by the present disclosure, a hu-IL-2R subunit binding ratio can be, for example, less than 10, less than 3, less than 1, or less than 0.3.

[0740] In an IL-2Rβγc binding compound such as an IL-2Rβγc binding compound provided by the present disclosure, a hu-IL-2R binding ratio can be, for example, from 10 to 10,000, from 10 to 3,000, from 10 to 1,000 or from 30 to 300. In an IL-2Rβγc binding compound such as an IL-2Rβγc binding compound provided by the present disclosure, a hu-IL-2R binding ratio can be, for example, greater than 10, greater than 30, greater than 100, greater than 300, greater than 1,000, or greater than 3,000. In an IL-2Rβγc ligand provided by the present disclosure, a hu-IL-2R binding ratio can be, for example, less than 10,000, less than 3,000, less than 1,000, less than 300, less than 100, or less than 30.

[0741] In an IL-2Rβγc binding compound such as an IL-2Rβγc binding compound provided by the present disclosure, a hu-IL-2R binding ratio can be, for example, from 0.1 to 0.001 or from 0.03 to 0.003. In an IL-2Rβγc binding compound such as an IL-2Rβγc binding compound provided by the present disclosure, a hu-IL-2R binding ratio can be, for example, greater than 0.001, greater than 0.003, greater than 0.01, or greater than 0.03. In an IL-2Rβγc binding compound such as an IL-2Rβγc binding compound provided by the present disclosure, a hu-IL-2R binding ratio can be, for example, less than 0.1, less than 0.03, less than 0.01, or less than 0.003.

[0742] In an IL-2Rβγc ligand such as an IL-2Rβγc ligand provided by the present disclosure, a hu-IL-2R binding ratio can be, for example, from 0.1 to 10 or from 0.03 to 3. In an IL-2Rβγc binding compound such as an IL-2Rβγc binding compound provided by the present disclosure, a hu-IL-2R binding ratio can be, for example, greater than 0.1, greater than 0.3, greater than 1, or greater than 3. In an IL-2Rβγc binding compound such as an IL-2Rβγc binding compound provided by the present disclosure, a hu-IL-2R binding ratio can be, for example, less than 10, less than 3, less than 1, or less than 0.3.

[0743] The IC50 ratio for binding of IL-2 to the IL-2R subunits is greater than 1,000 where the ratio is the ratio of the IC50 for binding of IL-2 to the IL-2Rβ subunit to the IC50 for binding of IL-2 to the IL-2Rγc subunit.

[0744] The IC50 ratio for binding of IL-15 to IL-15R subunits is greater than 1,000 where the ratio is the ratio of the IC50 for binding of IL-15 to the IL-15Rβ subunit to the IC50 for binding of IL-15 to the IL-15Rγc subunit.

[0745] The binding IC50 for the IL-2Rβ and IL-2Rγc ligands, IL-2, IL-15 can be determined using a competition ELISA assay as described in the Examples.

[0746] Tandem IL-2Rβγc ligands provided by the present disclosure can comprise two or more IL-2Rβγc ligands. The two or more IL-2Rβγc ligands can be bound together to form a linear or non-linear structure. For example, a tandem IL-2Rβγc ligand can have the structure of Formula (8a) or Formula (8b):

BGL-(-Lₜ₁-BGL-)ₙ₁-Lₜ₁-BGL (8a)

Lₜ₂{(-Lₜ₁-BGL-)ₙ₂-Lₜ₁-BGL}ₚ (9b)

[0747] where,
[0748] each BGL is independently selected from an IL-2Rβγc ligand; and
[0749] Lₜ₁ is a divalent tandem linker;
[0750] Lₜ₂ is a p-valent tandem linker;
[0751] n1 is an integer from 1 to 6; and
[0752] n2 is an integer from 0 to 6; and
[0753] p is an integer from 3 to 8.

[0754] In tandem IL-2Rβγc ligands of Formula (8a) and (8b), each IL-2Rβγc ligand can be the same.

[0755] In tandem IL-2Rβγc ligands of Formula (8a) and (8b), at least one IL-2Rβγc ligand can be different than another IL-2Rβγc ligand.

[0756] In tandem IL-2Rβγc ligands of Formula (8a) and (8b), each IL-2Rβγc ligand can independently be bound to a tandem linker through the N-terminus or through the C-terminus of the respective IL-2Rβγc ligand.

[0757] In tandem IL-2Rβγc ligands of Formula (8a) and (8b), each of the IL-2Rβγc ligands can comprise one or more flanking amino acids.

[0758] A tandem linker, Lₜ₁ and Lₜ₂, can be a peptidyl tandem linker and can, for example, from 1 to 50 amino acids, from 2 to 40 amino acids, or from 5 to 30 amino acids.

[0759] A tandem linker can comprise a chemical linker such as a triazole-containing linker provided by the present disclosure.

[0760] Each divalent tandem linker Lₜ₁ can be the same as each of the other divalent tandem linkers, or at least one of the divalent tandem linkers can be different than another tandem linker.

[0761] In a tandem IL-2Rβγc ligand of Formula (8a), n can be, for example, 1, 2, 3, 4, 5, or 6.

[0762] In a tandem IL-2Rβγc ligand of Formula (8b), each n can independently be selected from 0, 1, 2, 3, 4, 5, or 6.

[0763] In a tandem IL-2Rβγc ligand of Formula (8b), p can be, for example, 3, 4, 5, 6, 7, or 8.

[0764] A p-valent tandem linker can comprise any suitable polyfunctional chemical moiety. For example, tandem IL-2Rβγc ligands of Formula (8a) and (8b) can have a molecular weight less than 10,000 Da, less than 6,000 Da, less than 2,000 Da, less than 1,000 Da, or less than 500 Da.

[0765] An IL-2Rβγc ligand provided by the present disclosure can be bound to a naturally occurring protein or to a synthetic molecule to provide an IL-2Rβγc ligand construct. Examples of suitable construct partners include polymers, proteins, Fc-fragments, immunoglobulin fragments, albumin binding compounds, and antibodies.

[0766] An IL-2Rβγc ligand construct such as an IL-2Rβγc construct provided by the present disclosure can be configured to provide desired pharmacokinetic properties, provide reduced immunogenicity, to target a specific cell population, and/or to provide enhanced therapeutic efficacy.

[0767] An IL-2Rβγc construct such as an IL-2Rβγc construct provided by the present disclosure can have a hu-IL-2R binding ratio, for example, from 10, to 10,000, from 10 to 3,000, from 10 to 1,000 or from 30 to 300. An IL-2Rβγc construct such as an IL-2Rβγc construct provided by the present disclosure can have a hu-IL-2R binding ratio, for example, greater than 10, greater than 30, greater than 100, greater than 300, greater than 1,000, or greater than 3,000. An IL-2Rβγc construct provided by the present disclosure can have a hu-IL-2R binding ratio, for example, less than 10,000, less than 3,000, less than 1,000, less than 300, less than 100, or less than 30.

[0768] An IL-2Rβγc construct such as an IL-2Rβγc construct provided by the present disclosure can have a hu-IL-2R binding ratio, for example, from 0.1 to 0.0001, from 0.1 to 0.0003 from 0.1 to 0.001 or from 0.03 to 0.003. An IL-2Rβγc construct such as an IL-2Rβγc construct provided by the present disclosure can have a hu-IL-2R binding ratio, for example, greater than 0.0001, greater than 0.0003, greater than 0.001, greater than 0.003, greater than 0.01, or greater than 0.03. An IL-2Rβγc construct such as an IL-2Rβγc construct provided by the present disclosure can have a hu-IL-2R binding ratio, for example, less than 0.1, less than 0.03, less than 0.01, less than 0.003, less than 0.001, or less than 0.0003.

[0769] An IL-2Rβγc construct such as an IL-2Rβγc construct provided by the present disclosure can have a hu-IL-2R binding ratio, for example, from 0.1 to 10 or from 0.03 to 3. An IL-2Rβγc construct provided by the present disclosure can have a hu-IL-2R binding ratio can be, for example, greater than 0.1, greater than 0.3, greater than 1, or greater than 3. In an IL-2Rβγc construct such as an IL-2Rβγc construct provided by the present disclosure, a hu-IL-2R binding ratio can be, for example, less than 10, less than 3, less than 1, or less than 0.3.

[0770] An IL-2Rβγc construct such as an IL-2Rβγc construct provided by the present disclosure can have a hu-IL-2R subunit binding ratio, for example, from 10 to 10,000, from 10 to 3,000, from 10 to 1,000 or from 30 to 300. An IL-2Rβγc construct such as an IL-2Rβγc construct provided by the present disclosure can have a hu-IL-2R subunit binding ratio, for example, greater than 10, greater than 30, greater than 100, greater than 300, greater than 1,000, or greater than 3,000. An IL-2Rβγc construct such as an IL-2Rβγc construct provided by the present disclosure can have a hu-IL-2R subunit binding ratio, for example, less than 10,000, less than 3,000, less than 1,000, less than 300, less than 100, or less than 30.

[0771] An IL-2Rβγc construct such as an IL-2Rβγc construct provided by the present disclosure can have a hu-IL-2R subunit binding ratio, for example, from 0.1 to 0.001 or from 0.03 to 0.003. An IL-2Rβγc construct such as an IL-2Rβγc construct provided by the present disclosure can have a hu-IL-2R subunit binding ratio, for example, greater than 0.001, greater than 0.003, greater than 0.01, or greater than 0.03. An IL-2Rβγc construct such as an IL-2Rβγc construct provided by the present disclosure can have a hu-IL-2R subunit binding ratio, for example, less than 0.1, less than 0.03, less than 0.01. or less than 0.003.

[0772] An IL-2Rβγc construct such as an IL-2Rβγc construct provided by the present disclosure can have a hu-IL-2R subunit binding ratio, for example, from 0.1 to 10 or from 0.3 to 3. An IL-2Rβγc construct such as an IL-2Rβγc construct provided by the present disclosure can have a hu-IL-2R subunit binding ratio, for example, greater than 0.1, greater than 0.3, greater than 1, or greater than 3. An IL-2Rβγc construct such as an IL-2Rβγc construct provided by the present disclosure can have a hu-IL-2R subunit binding ratio, for example, less than 10, less than 3, less than 1, or less than 0.3.

[0773] IL-2Rβγc binding compounds are disclosed in which the IL-2Rβ ligand and the IL-2Rγc ligand can be selected to bind to the IL-2Rβ and IL-2Rγc subunits with a desired IC50. The ratio of the IC50 for binding of the IL-2Rβ ligand to the IC50 for binding of the IL-2Rγc ligand to the IL-2Rγc subunit can range, for example, from 10,000 to 0.00001. The IL-2Rβγc binding compounds can include peptides, proteins other than either the natural cytokines or muteins of the natural cytokines, antibodies, and antibody fragments. The IL-2Rβγc binding compounds having a IC50 IL-2Rβ/IL-2Rγc binding ratio from 10,000 to 0.00001 can be IL-2R agonists. The IL-2Rβ ligand and IL-2Rγc ligand can be independently synthesized and selected to have absolute and relative IC50s for binding to the IL-2Rβ and IL-2Rγc subunits, respectively, and maintain a level of agonist activity

[0774] An IL-2Rβ ligand and an IL-2Rγc ligand can be independently selected based on their absolute and relative binding affinity to the respective IL-2R subunits and incorporated into an IL-2Rβγc heterodimer and/or IL-2Rβγc construct. An IL-2Rβγc construct can include, for example, a peptide, a protein that is not a natural cytokine or muteins of the natural cytokines, an antibody, or an antibody fragment. The IL-2Rβ ligand and the IL-2Rγc ligand can maintain their absolute and relative binding affinities (IC50) for their respective subunits when incorporated into IL-2Rβγc heterodimer and/or construct. By independently selecting the absolute and relative binding affinities (IC50) of the IL-2Rβ and IL-2Rγc ligands, the resulting IL-2Rβγc ligands and IL-2Rβγc ligand constructs with wide range of subunit binding affinity ratios, can exhibit a desired agonist activities IL-2Rβγc agonists having selected IL-2Rβ and IL-2Rγc affinities (IC50) can be useful as selective IL-2R agonists and for tailored therapies.

[0775] A similar approach can be applied to compounds capable of binding to other cytokine receptors such as IL-7R, IL-10R, IL-11R, IL-12R, IL-15R, IL-20R, IFN-α receptor, IFN-β receptor, IFN-γ receptor, C-CSF receptor, GM-CSF receptor, TNF-α receptor, TRAP receptor, and TRAIL receptor.

[0776] Methods provided by the present disclosure include methods of selecting IL-2Rβ and IL-2Rγc ligands based on their absolute and relative binding to their respective IL-2R subunits and combining the selected IL-2Rβ and IL-2Rγc ligands to provide an IL-2Rβγc binding compound such as an IL-2Rβγc heterodimer or IL-2Rβγc ligand construct having desired pharmacological properties such as level of agonist activity, selectivity, and/or biased efficacy for different therapeutic purposes.

[0777] The IL-2Rβ and IL-2Rγc ligands can be selected to have different binding affinities to the respective IL-2R subunits, and/or can have a different IC50 binding ratio to the respective IL-2R subunits compared to the native IL-2 cytokine.

[0778] The selected IL-2Rβ and IL-2Rγc ligands can be coupled using a peptide or non-peptidyl linker as disclosed herein to form a synthetic IL-2Rβγc ligand. The selected IL-2Rβ ligand, the selected IL-2Rγc ligand, and/or the synthetic IL-2Rβγc ligand can be coupled to a construct partner such as a protein, antibody, or antibody fragment using the methods disclosed herein.

[0779] An IL-2Rβγc ligand can be bound to the construct partner through a construct linker.

[0780] An IL-2Rβγc ligand construct can comprise a single IL-2Rβγc ligand bound to a construct partner or two or more IL-2Rβγc ligands bound to a construct partner.

[0781] Each of the two or more IL-2Rβγc ligands bound to a construct partner can be the same, or at least one of the IL-2Rβγc ligands can be different than at least one of the other IL-2Rβγc ligands bound to the construct partner. The IL-2Rβγc ligands can differ, for example, with respect to the IL-2Rβ ligand, the IL-2Rγc ligand, the IL-2Rβγc ligand linker, and/or to the flanking amino acids.

[0782] Each of the IL-2Rβγc ligands can be independently bound to a construct partner through a respective construct linker. Each of the respective construct linkers can be the same, or at least one of the construct linkers can be different than at least one other construct linker. The construct linkers can differ, for example, with respect to the length and/or to the chemical composition.

[0783] Each of the IL-2Rβγc ligands can independently be bound to a construct partner through the N-terminus or the C-terminus of the respective IL-2Rβγc ligand.

[0784] An IL-2Rβγc ligand construct can comprise a tandem IL-2Rβγc ligand bound to a construct partner. The tandem IL-2Rβγc ligand can be bound to the construct partner through a construct linker.

[0785] An IL-2Rβγc ligand construct can comprise a single tandem IL-2Rβγc ligand bound to a construct partner or two or more tandem IL-2Rβγc ligands bound to a construct partner.

[0786] Each of the two or more tandem IL-2Rβγc ligands bound to a construct partner can be the same, or at least one of the tandem IL-2Rβγc ligands can be different than at least one of the other tandem IL-2Rβγc ligands bound to the construct partner. The tandem IL-2Rβγc ligands can differ, for example, with respect to the IL-2Rβ ligands, the IL-2Rγc ligands, the IL-2Rβγc ligand linkers, the tandem linkers, and/or the flanking amino acids.

[0787] Each of the tandem IL-2Rβγc ligands can be bound to a construct partner through a respective construct linker. Each of the respective construct linkers can be the same, or at least one of the construct linkers can be different than at least one other construct linker. The construct linkers can differ, for example, with respect to the length and/or to the chemical composition.

[0788] Each of the tandem IL-2Rβγc ligands can independently be bound to the construct partner through the N-terminus or the C-terminus of the respective tandem IL-2Rβγc ligand.

[0789] An IL-2Rβγc ligand construct can comprise at least one IL-2Rβ ligand and at least one tandem IL-2Rγc ligand bound to a construct partner. Each of the at least one IL-2Rβ ligand and the at least one IL-2Rγc ligand can independently be bound to the construct partner through a construct linker. For example, an IL-2Rβγc ligand construct can comprise from 1 to 10 IL-2Rβ ligands provided by the present and from 1 to 10 IL-2Rγc ligands provided by the present disclosure.

[0790] An IL-2Rβγc ligand construct can comprise, for example, at least one IL-2Rβγc ligand, at least one tandem IL-2Rβγc ligand, at least one IL-2Rβ ligand, and/or at least one IL-2Rγc ligand, providing that the IL-2Rβγc ligand comprises at least one IL-2Rβ ligand and at least one IL-2Rγc ligand.

[0791] An IL-2Rβγc ligand construct can compromise one or more IL-2Rβγc ligands bound to a side chain of a molecule such as an amino acid forming a polymer or protein.

[0792] An IL-2Rβγc ligand construct can compromise one or more IL-2Rβγc ligands in which the one or more IL-2Rβγc ligands is incorporated into the backbone of the polymer or polypeptide. Thus, an IL-2Rβγc ligand construct can comprise one or more IL-2Rβγc ligands in which the one or more IL-2Rβγc ligands are bound to a N-terminus of a polypeptide, bound to a C-terminus of a polypeptide, bound to an amino acid side chain of a polypeptide, and/or incorporated into the amino acid sequence of the polypeptide.

[0793] IL-2Rβγc ligand constructs provided by the present disclosure include fusion proteins.

[0794] Examples of suitable fusion protein partners include Fc-fragments, immunoglobulins such as IgG1, IgG2, and IgG4, immunoglobulin fragments such as IgG1, IgG2, and IgG4 fragments, naturally occurring proteins such as human serum albumin (HSA), antibodies, other human proteins and mutants and/or variants thereof; proteins, and polypeptides. A fusion protein partner can be a naturally occurring protein, a modified-naturally occurring protein, or a synthetic protein.

[0795] A fusion partner can be used to provide a desirable pharmacokinetic profile, for cell-targeting, for dual pharmacology, and/or for enhancing therapeutic efficacy.

[0796] For example, an IL-2Rβγc ligand provided by the present disclosure can be fused to a protein that increases the circulating half-life of the IL-2Rβγc ligand. Fusions of therapeutic proteins with IgG or the IgG-Fc chain can accomplish this by increasing the hydrodynamic radius of the protein, thus reducing renal clearance, and through Neonatal Fc Receptor (FcRn)-mediated recycling of the fusion protein, thus prolonging the circulating half-life. Other fusion proteins can be designed to tailor properties such as the pharmacokinetics, biodistribution, pharmacodynamics, pharmacology, cytotoxicity, selectivity, and/or targeting.

[0797] An IL-2Rβγc ligand fusion protein provided by the present disclosure can comprise one or more IL-2Rβγc ligands bound to a fusion protein partner. Each of the one or more IL-2Rβγc ligands can be independently bound to a fusion protein partner through the N-terminus or through the C-terminus of the respective IL-2Rβγc ligand. Each of the one or more IL-2Rβγc ligands can be the same. At least one of the one or more IL-2Rβγc ligands can be different than at least one other IL-2Rβγc ligand. The amino acid sequence at the junction between an IL-2Rβγc ligand and a fusion partner protein can be either a direct fusion of the two protein sequences or can be a fusion with an intervening peptidyl fusion (construct) linker. Peptidyl linkers can be included as spacers between an IL-2Rβγc ligand and the fusion partner. Peptidyl linkers can promote proper protein folding and stability of the component protein and the one or more IL-2Rβγc ligands, improve protein expression, and/or can enhance bioactivity of the IL-2Rβγc ligand and/or the fusion partner.

[0798] Peptidyl linkers used in IL-2Rβγc ligand fusion proteins can be designed to be unstructured flexible peptides. Peptidyl linkers can be, for example, rich in glycine and serine, such as repeats of a sequence such as, for example, a peptidyl linker having any one of SEQ ID NOS: 9380-9401, where n is an integer from 1 to 10. A flexible peptidyl linker with a fully extended β-strand conformation can have an end-to-end length, for example, of 3.5 Å per residue. Thus, a peptidyl linker of 5, 10, 15, or 10 residues can have a maximum fully extended length of 17.5 Å, 35 Å, 52.5 Å, 70 Å, 140 Å, or more than 140 Å, respectively.

[0799] Peptidyl linkers can be rigid linkers, such as linkers including proline and other amino acids such as alanine, lysine or glutamic acid. For example, a rigid linker can have an amino acid sequence of any one of SEQ ID NOS: 9419-9425. A peptidyl linker can facilitate providing an appropriate conformation and orientation of individual fusion protein moieties to facilitate the engagement of an IL-2Rβγc ligand with the IL-2Rβ subunit and/or IL-2Rγc subunit of IL-2R, facilitate binding of the IL-2Rβγc ligand to IL-2R, enable fusion protein recycling, and/or prolong the circulating half-life of the IL-2Rβγc ligand.

[0800] There are multiple options for the design and construction of a fusion protein comprising one or more IL-2Rβγc ligands and which can be selected to obtain an IL-2Rβγc fusion protein having the desired biological activity and pharmaceutical characteristics. Design options include, for example, the IL-2Rβγc ligand including the selection of the IL-2Rβ ligand, the IL-2Rγc ligand, and the IL-2Rβγc ligand linker; the fusion partner protein binding moiety; the configuration of the fusion partner binding moiety in the fusion protein; the peptidyl linker binding an IL-2Rβγc ligand to the fusion partner; and the fusion partner protein.

[0801] In general, preparation of IL-2Rβγc ligand fusion proteins provided by the present disclosure can be prepared using recognized recombinant DNA techniques involving, for example, polymerase chain amplification reactions (PCR), preparation of plasmid DNA, cleavage of DNA with restriction enzymes, preparation of oligonucleotides, ligation of DNA, isolation of mRNA, introduction of the DNA into a suitable cell, transformation or transfection of a host, and culturing of the host. Additionally, IL-2Rβγc ligand fusion proteins can be isolated and purified using chaotropic agents and using well-known electrophoretic, centrifugation, and chromatographic methods.

[0802] IL-2Rβγc ligand fusion proteins provided by the present disclosure can comprise one or more small ubiquitin-related modifier (SUMO) proteins. Modification of cellular proteins by the ubiquitin-like modifier SUMO can regulate various cellular processes, such as nuclear transport, signal transduction, and stabilization of proteins. Once covalently attached to cellular targets, SUMO regulates protein/protein and protein/DNA interactions, as well as localizes and stabilizes the target protein.

[0803] For example, an IL-2Rβγc ligand can be bound to a first linker, which is bound to a SUMO protein, which is further bound to a second linker binding the SUMO protein to a fusion partner such as an IgG or Fc-fragment. SUMO fusions can enhance expression, promote solubility, and/or facilitate optimized protein folding Attachment of a highly stable structure such as that of ubiquitin or SUMO at the N- or C-terminus of a fusion partner protein can increase the yield by increasing stability. The solubilizing effect of ubiquitin and ubiquitin-like proteins may also be explained in part by the outer hydrophilicity and inner hydrophobicity of the core structure of ubiquitin and SUMO, exerting a detergent-like effect on otherwise insoluble proteins.

[0804] One or more IL-2Rβγc ligands can be bound to a construct partner that provides desired pharmacokinetic properties. For example, one or more IL-2Rβγc ligands can be bound to a synthetic polymer or to a protein, such as a naturally occurring protein, that exhibits an extended half-life in the systemic circulation.

[0805] An IL-2Rβγc ligand provided by the present disclosure can be conjugated to or fused to molecules that extend the serum half-life of the IL-2Rβγc ligand without increasing the risk that such half-life extension would increase the likelihood or the intensity of a side-effect or adverse event in a patient. Dosing of extended serum half-life IL-2Rβγc ligands can allow for prolonged target coverage with lower systemic maximal exposure (Cₘₐₓ). Extended serum half-life can allow for use of lower administered doses and/or a less frequent dosing regimen of an IL-2Rβγc ligand or IL-2Rβγc ligand construct.

[0806] The serum half-life of an IL-2Rβγc ligand can be extended by any suitable method. Such methods include linking an IL-2Rβγc ligand to a peptide that binds to the neonatal Fc receptor or linking an IL-2Rβγc ligand to a protein having extended serum half-life such as IgG, an IgG Fc fragment or to human serum albumin (HSA).

[0807] Examples of IL-2Rβγc ligand pharmacokinetic constructs include, (a) recombinantly fusing one or more IL-2Rβγc ligands to a naturally long-half-life protein or protein domain such as Fc fusion, transferrin fusion or albumin fusion; (b) recombinantly fusing one or more IL-2Rβγc ligands to an inert polypeptide such as XTEN®, a homoamino acid polymer (HAP, HAPylation), a proline-alanine-serine polymer (PAS, PASylation), an elastin-like peptide (ELP, ELPylation), or a gelatin-like protein GLK polymer; (c) increasing the hydrodynamic radius by chemical conjugation of one or more IL-2Rβγc ligands to a repeat chemical moiety such as PEGylation or hyaluronic acid; (d) increasing the negative charge of the one or more IL-2Rβγc ligands by polysialylation or by fusing to a negatively charged highly sialylated peptide such as carboxy-terminal peptide (CTP of chorionic gonadotropin (CG) β-chain); or (e) conjugating of one or more IL-2Rβγc ligands to a peptide or protein-binding domain of a normally long half-life protein such as human serum albumin (HSA), transferrin, fusion to the constant fragment Fc chain of a human immunoglobulin IgG, or fusion to non-natural polypeptides such as XTEN®.

[0808] One or more IL-2Rβγc ligands can be bound to a synthetic polymer.

[0809] For example, an IL-2Rβγc ligands can be conjugated to polyethylene glycol (PEG) chains (to extend the half-life of the IL-2Rβγc ligand in the systemic circulation. A PEG can have a molecular weight, for example, from 5 kDa to 100 kD, from 10 kDa to 80 kDa, or from 20 kDa to 60 kDa.

[0810] PEGylation can be achieved chemically or enzymatically and the biophysical and biochemical properties of the conjugate can depend, for example, on structure, size, number and location of PEG chains. PEGylation can prolong the circulation half-life of an IL-2Rβγc ligand by masking proteolytic cleavage sites and/or by increasing the effective hydrodynamic radii of the ligands, thereby reducing renal clearance.

[0811] An IL-2Rβγc ligand can be conjugated to either linear or branched-chain monomethoxy polyethylene glycol (mPEG), resulting in increases in the molecular mass and hydrodynamic radius and decrease the rate of glomerular filtration by the kidney. PEG is a highly flexible uncharged, mostly non-immunogenic, hydrophilic, and non-biodegradable molecule, which generates a larger hydrodynamic radius than an equivalently sized protein. PEGylation has been used widely to lengthen the half-life of pharmacologically active compounds.

[0812] Similar to IgG, serum albumin displays an unusually long circulation half-life. Half-life prolongation of these functionally and structurally unrelated proteins is derived primarily from interaction with FcRn. Although HSA binds FcRn at a different site than IgG, both interactions are pH-dependent and result in FcRn-mediated rescue from cellular catabolism. IL-2Rβγc ligand constructs capable of extending the circulation half-life include, for example, genetic fusion to HSA, conjugation to HSA-binding moieties, and fusion to HSA-bonding antibodies or antibody fragments.

[0813] One or more IL-2Rβγc ligands can be bound to an XTEN® polypeptide (Amunix Pharmaceuticals Inc.). XTEN® polypeptides are generally 200 amino acids or more in length, are designed to mask antigen binding regions of scFvs, to be unstructured and to have a low immunogenicity. XTEN® polypeptides can increase the circulating half-life of therapeutic agents. One or more IL-2Rβγc ligands can be bound to an XPAT® polypeptide (Amunix Pharmaceuticals, Inc.). XPAT® polypeptides include substrates for proteases and can be designed to be active with one or more proteases, to select the cleavage rate, and to impart specificity.

[0814] Genetic fusing of one or more IL-2Rβγc ligands to serum transferrin (TO can result in enhanced pharmacokinetics. Serum transferrin is an 80 kDa glycoprotein that mediates iron transport from the systemic circulation into cells and tissues. When bound to ferric ions, transferrin displays high affinity for the transferrin receptors (TfRs) displayed on the surface of most cell types. Upon interaction, the Tf/TfR complex is internalized via receptor-mediated endocytosis into endosomes, where iron is released and Tf/TfR is then recycled to the cell surface. Fusion of protein therapeutics to Tf or TfR-binding antibodies can be used for half-life extension, targeting of malignant cells overexpressing TfRs and targeting of the rai capillary endothelium for transport of therapeutics across the blood brain barrier.

[0815] Fusion of an IL-2Rβγc ligand to IgG or Fc can result in increased avidity of the IL-2Rβγc ligand provides for purification via protein G./A affinity chromatography and can prolong the circulation half-life of the IL-2Rβγc ligand.

[0816] Half-life extension of IL-2Rβγc ligand/IgG fusion proteins results from a combination of reduced renal clearance due to increased molecular size and FcRn-mediated recycling.

[0817] One or more IL-2Rβγc ligands can be bound to any suitable IgG including, for example, IgG1, IgG2, or IgG4. The one or more IL-2Rβγc ligands can be bound to any suitable portion of IgG such as the light chain VL or to the heavy chain VH and including the N-terminus, the C-terminus, an amino acid side chain, or can be incorporated into the amino acid sequence of the light or heavy chain of IgG.

[0818] IL-2Rβγc ligand constructs provided by the present disclosure can comprise IL-2Rβγc ligand/IgG constructs.

[0819] An IgG construct comprises at least one heavy chain and at least one light chain. An IL-2Rβγc ligand can be bound to the N-terminus of the heavy chain, to the N-terminus of the light chain, or to the N-terminus of the heavy chain, and to the N-terminus of the light chain.

[0820] An IL-2Rβγc ligand can be bound to the C-terminus of the heavy chain, for example, to the CH3 domain, to the N-terminus of the heavy chain and/or to the N-terminus of the light chain.

[0821] In an IgG construct, an IL-2Rβγc ligand can be bound to the N-terminus of one or both heavy chains, to the N-terminus of one or both light chains, and/or to one or both C-termini of the heavy chains.

[0822] In an IgG construct, an IL-2Rβγc ligand can be bound to an amino acid side chain of IgG.

[0823] In an IgG construct, an IgG heavy chain and/or an IgG light chain can comprise one or more IL-2Rβγc ligands incorporated into the amino acid sequence forming the IgG heavy chain and/or the IgG light chain.

[0824] Examples of IL-2Rβγc ligand IgG constructs are shown in FIGS. 20A-20J.

[0825] In an IL-2Rβγc construct each linker bonding an IL-2Rβγc ligand to the IgG can independently be the same or can be different.

[0826] For example, an IL-2Rβγc ligand can be bound to the C-terminus of one or both IgG heavy chains, to the C-terminus of one or both IgG light chains, to the N-terminus of one or both IgG heavy chains, and/or to the N-terminus of one or both IgG light chains. Examples showing IL-2Rβγc ligand constructs in which an IL-2Rβγc ligand is bound to the IgG heavy and/or light chains are shown in FIG. 20A-20J. Each of the IL-2Rβγc ligands can be bound to the IgG through a suitable construct linker.

[0827] One or more IL-2Rβγc ligands can be bound to an IgG fragment such as a single light chain VL domain, a single heavy chain VH domain or to the Fc region. The fragments can be derived from any suitable immunoglobulin such as IgA, IgD, IgE, IgG, or IgM. The fragments can be derived from any suitable IgG such as, for example, IgG1, IgG2, or IgG4.

[0828] One or more IL-2Rβγc ligands can be bound to an Fc-fragment. The Fc-fragment can be monomeric, can be dimeric, or can be a modified Fc-fragment. A dimeric Fc-fragment can comprise one or more disulfide bonds on the N-terminus. An example of a modification is a knob-into-hole modification comprising a knob modification in the CH3 domain of one of the immunoglobulin heavy chain and a hole modification in the other immunoglobulin heavy chain.

[0829] Constructs provided by the present disclosure include IL-2Rβγc ligand-Fc fusion proteins. An Fc chain can include two different polypeptides that self-assemble into either homodimeric Fc chains or heterodimeric Fc chains. The fusion proteins can include an Fc chain, one or more Fc chain linkers, and one or more IL-2Rβγc ligands. An Fc chain linker binds an IL-2Rβγc ligand provided by the present disclosure to an Fc chain.

[0830] The Fc chain can comprise the Fc chain of any suitable immunoglobulin isotype including IgA, IgD, IgE, IgG, and IgM immunoglobulin isotypes. The Fc-fragment can be derived from any suitable IgG immunoglobulin including, for example, an IgG1, IgG2, or IgG4.

[0831] An IL-2Rβγc ligand Fc-fusion protein can comprise one or more IL-2Rβγc ligands. Each of the one or more IL-2Rβγc ligands can be the same or can be different than other IL-2Rβγc ligands bound to a Fc chain.

[0832] An IL-2Rβγc ligand Fc-fragment construct, i.e., IL-2Rβγc Fc fusion, can comprise an IL-2Rβγc ligand bound to the C-terminus of one Fc-chain or to the C-terminus of both Fc-chains of the Fc-fragment.

[0833] An IL-2Rβγc ligand Fc fusion can comprise one IL-2Rβγc ligand bound to the N-terminus of the Fc-fragment or two IL-2Rβγc ligands bound to the N-terminus of the Fc-fragment.

[0834] An IL-2Rβγc ligand Fc fusion can comprise one or two IL-2Rβγc ligands bound to the C-terminus of the Fc-fragment and one or two IL-2Rβγc ligands can be bound to the N-terminus of the Fc-fragment.

[0835] Each IL-2Rβγc ligand can be covalently bound to an Fc-fragment through an Fc linker. Each Fc linker binding an IL-2Rβγc ligand to an Fc-fragment can be the same or different.

[0836] Each IL-2Rβγc ligand can independently be bound to an Fc linker through the N-terminus or through the C-terminus of the IL-2Rβγc ligand.

[0837] Examples of IL-2Rβγc ligand Fc-fragment constructs are shown in FIGS. 20A-20J and 21A-21C.

[0838] Examples of constructs comprising an IL-2Rβγc ligand bound to an hIgG1 or hIgG2 immunoglobulin Fc-fragment are provided in Table 6.

TABLE 6
Ligand immunoglobulin constructs.

SEQ ID NO: 8061 hIgG2-Fc-(PA)10 IL-2Rβγc ligand
ERKSSVECPPCPAPPVAGPSVFLFPPKPKDTLMISRTPEVTCVVVDVSHEDPEVQFNWYVDG
VEVHNAKTKPREEQFNSTFRVVSVLTVVHQDWLNGKEYKCKVSNKGLPAPIEKTISKTKG
QPREPQVYTLPPSREEMTKNQVSLTCLVKGFYPSDIAVEWESNGQPENNYKTTPPMLDSDG
SFFLYSKLTVDKSRWQQGNVFSCSVMHEALHNHYTQKSLSLSPGAPAPAPAPAPAPAPAPA
PAPAGGWYPCWIARVGELCDLEEGPVNRGGGGSGGVVCQDWEGVELCWQGG
SEQ ID NO: 8062 hIgG2-Fc-(PA)10 IL-2Rβγc ligand
ERKSSVECPPCPAPPVAGPSVFLFPPKPKDTLMISRTPEVTCVVVDVSHEDPEVQFNWYVDG
VEVHNAKTKPREEQFNSTFRVVSVLTVVHQDWLNGKEYKCKVSNKGLPAPIEKTISKTKG
QPREPQVYTLPPSREEMTKNQVSLTCLVKGFYPSDIAVEWESNGQPENNYKTTPPMLDSDG
SFFLYSKLTVDKSRWQQGNVFSCSVMHEALHNHYTQKSLSLSPGAPAPAPAPAPAPAPAPA
PAPAGGAVEFYPCWLARIGELCDLVEPGGGGSGGVVCQDWEGVELCWQGG
SEQ ID NO: 8063 hIgG2-Fc-(PA)10 IL-2Rβγc ligand
ERKSSVECPPCPAPPVAGPSVFLFPPKPKDTLMISRTPEVTCVVVDVSHEDPEVQFNWYVDG
VEVHNAKTKPREEQFNSTFRVVSVLTVVHQDWLNGKEYKCKVSNKGLPAPIEKTISKTKG
QPREPQVYTLPPSREEMTKNQVSLTCLVKGFYPSDIAVEWESNGQPENNYKTTPPMLDSDG
SFFLYSKLTVDKSRWQQGNVFSCSVMHEALHNHYTQKSLSLSPGAPAPAPAPAPAPAPAPA
PAPAGGWYPCWIARVGELCDMEGGGGSGGVVCQDWEGVELCWQGG
SEQ ID NO: 8064 hIgG2-Fc-(PA)10 IL-2Rβγc ligand
ERKSSVECPPCPAPPVAGPSVFLFPPKPKDTLMISRTPEVTCVVVDVSHEDPEVQFNWYVDG
VEVHNAKTKPREEQFNSTFRVVSVLTVVHQDWLNGKEYKCKVSNKGLPAPIEKTISKTKG
QPREPQVYTLPPSREEMTKNQVSLTCLVKGFYPSDIAVEWESNGQPENNYKTTPPMLDSDG
SFFLYSKLTVDKSRWQQGNVFSCSVMHEALHNHYTQKSLSLSPGAPAPAPAPAPAPAPAPA
PAPAGGEWFHDCFLAKVGDLCDLFLWGGGGSGGVVCQDWEGVELCWQGG
SEQ ID NO: 8065 hIgG2-Fc-(PA)10 IL-2Rβγc ligand
ERKSSVECPPCPAPPVAGPSVFLFPPKPKDTLMISRTPEVTCVVVDVSHEDPEVQFNWYVDG
VEVHNAKTKPREEQFNSTFRVVSVLTVVHQDWLNGKEYKCKVSNKGLPAPIEKTISKTKG
QPREPQVYTLPPSREEMTKNQVSLTCLVKGFYPSDIAVEWESNGQPENNYKTTPPMLDSDG
SFFLYSKLTVDKSRWQQGNVFSCSVMHEALHNHYTQKSLSLSPGAPAPAPAPAPAPAPAPA
PAPAGGRYVHDCFIAQVGDLCDLFLHGGGGSGGVVCQDWEGVELCWQGG
SEQ ID NO: 8066 hG2-Fc-(PA)10 IL-2Rβγc ligand
ERKSSVECPPCPAPPVAGPSVFLFPPKPKDTLMISRTPEVTCVVVDVSHEDPEVQFNWYVDG
VEVHNAKTKPREEQFNSTFRVVSVLTVVHQDWLNGKEYKCKVSNKGLPAPIEKTISKTKG
QPREPQVYTLPPSREEMTKNQVSLTCLVKGFYPSDIAVEWESNGQPENNYKTTPPMLDSDG
SFFLYSKLTVDKSRWQQGNVFSCSVMHEALHNHYTQKSLSLSPGAPAPAPAPAPAPAPAPA
PAPAGGRSLVDCFLVKVGDLCDFFNWGGGGSGGVVCQDWEGVELCWQGG
SEQ ID NO: 8067 hIgG2-Fc-(PA)10 IL-2Rβγc ligand
ERKSSVECPPCPAPPVAGPSVFLFPPKPKDTLMISRTPEVTCVVVDVSHEDPEVQFNWYVDG
VEVHNAKTKPREEQFNSTFRVVSVLTVVHQDWLNGKEYKCKVSNKGLPAPIEKTISKTKG
QPREPQVYTLPPSREEMTKNQVSLTCLVKGFYPSDIAVEWESNGQPENNYKTTPPMLDSDG
SFFLYSKLTVDKSRWQQGNVFSCSVMHEALHNHYTQKSLSLSPGAPAPAPAPAPAPAPAPA
PAPAGGWYPCWIARVGELCDLEGGGGSGGVVCQDWEGVELCWQGG
SEQ ID NO: 8068 hIgG2-Fc-(PA)10 IL-2Rβγc ligand
ERKSSVECPPCPAPPVAGPSVFLFPPKPKDTLMISRTPEVTCVVVDVSHEDPEVQFNWYVDG
VEVHNAKTKPREEQFNSTFRVVSVLTVVHQDWLNGKEYKCKVSNKGLPAPIEKTISKTKG
QPREPQVYTLPPSREEMTKNQVSLTCLVKGFYPSDIAVEWESNGQPENNYKTTPPMLDSDG
SFFLYSKLTVDKSRWQQGNVFSCSVMHEALHNHYTQKSLSLSPGAPAPAPAPAPAPAPAPA
PAPAGGWYPCWLAQVGELCDLDGGGGSGGVVCQDWEGVELCWQGG
SEQ ID NO: 8069 hIgG2-Fc-(PA)10 IL-2Rβγc ligand
ERKSSVECPPCPAPPVAGPSVFLFPPKPKDTLMISRTPEVTCVVVDVSHEDPEVQFNWYVDG
VEVHNAKTKPREEQFNSTFRVVSVLTVVHQDWLNGKEYKCKVSNKGLPAPIEKTISKTKG
QPREPQVYTLPPSREEMTKNQVSLTCLVKGFYPSDIAVEWESNGQPENNYKTTPPMLDSDG
SFFLYSKLTVDKSRWQQGNVFSCSVMHEALHNHYTQKSLSLSPGAPAPAPAPAPAPAPAPA
PAPAGGWYPCWIARVGELCDLEEGPVNRGGGGSGGGGSGGVVCQDWEGVELCWQGG
SEQ ID NO: 8070 hIgG2-Fc-(PA)10 IL-2Rβγc ligand
ERKSSVECPPCPAPPVAGPSVFLFPPKPKDTLMISRTPEVTCVVVDVSHEDPEVQFNWYVDG
VEVHNAKTKPREEQFNSTFRVVSVLTVVHQDWLNGKEYKCKVSNKGLPAPIEKTISKTKG
QPREPQVYTLPPSREEMTKNQVSLTCLVKGFYPSDIAVEWESNGQPENNYKTTPPMLDSDG
SFFLYSKLTVDKSRWQQGNVFSCSVMHEALHNHYTQKSLSLSPGAPAPAPAPAPAPAPAPA
PAPAGGWYPCWIARVGELCDLEEGPVNRGGGGSGGGGSGGGGSGGVVCQDWEGVELCWQGG
SEQ ID NO: 8071 hIgG2-Fc-(PA)10 IL-2Rβγc ligand
ERKSSVECPPCPAPPVAGPSVFLFPPKPKDTLMISRTPEVTCVVVDVSHEDPEVQFNWYVDG
VEVHNAKTKPREEQFNSTFRVVSVLTVVHQDWLNGKEYKCKVSNKGLPAPIEKTISKTKG
QPREPQVYTLPPSREEMTKNQVSLTCLVKGFYPSDIAVEWESNGQPENNYKTTPPMLDSDG
SFFLYSKLTVDKSRWQQGNVFSCSVMHEALHNHYTQKSLSLSPGAPAPAPAPAPAPAPAPA
PAPAGGWYPCWIARVGELCDLEEGPVNRGGGGSGGGGSGGGGSGGGGSGGVVCQDWEG
VELCWQGG
SEQ ID NO: 8072 hIgG2-Fc-(PA)10 IL-2Rβγc ligand
ERKSSVECPPCPAPPVAGPSVFLFPPKPKDTLMISRTPEVTCVVVDVSHEDPEVQFNWYVDG
VEVHNAKTKPREEQFNSTFRVVSVLTVVHQDWLNGKEYKCKVSNKGLPAPIEKTISKTKG
QPREPQVYTLPPSREEMTKNQVSLTCLVKGFYPSDIAVEWESNGQPENNYKTTPPMLDSDG
SFFLYSKLTVDKSRWQQGNVFSCSVMHEALHNHYTQKSLSLSPGAPAPAPAPAPAPAPAPA
PAPAGGRYVHDCFIAQVGDLCDLFLHGGGGSGGGGSGGVVCQDWEGVELCWQGG
SEQ ID NO: 8073 hIgG2-Fc-(PA)10 IL-2Rβγc ligand
ERKSSVECPPCPAPPVAGPSVFLFPPKPKDTLMISRTPEVTCVVVDVSHEDPEVQFNWYVDG
VEVHNAKTKPREEQFNSTFRVVSVLTVVHQDWLNGKEYKCKVSNKGLPAPIEKTISKTKG
QPREPQVYTLPPSREEMTKNQVSLTCLVKGFYPSDIAVEWESNGQPENNYKTTPPMLDSDG
SFFLYSKLTVDKSRWQQGNVFSCSVMHEALHNHYTQKSLSLSPGAPAPAPAPAPAPAPAPA
PAPAGGRYVHDCFIAQVGDLCDLFLHGGGGSGGGGSGGGGSGGVVCQDWEGVELCWQGG
SEQ ID NO: 8074 hIgG2-Fc-(PA)10 IL-2Rβγc ligand
ERKSSVECPPCPAPPVAGPSVFLFPPKPKDTLMISRTPEVTCVVVDVSHEDPEVQFNWYVDG
VEVHNAKTKPREEQFNSTFRVVSVLTVVHQDWLNGKEYKCKVSNKGLPAPIEKTISKTKG
QPREPQVYTLPPSREEMTKNQVSLTCLVKGFYPSDIAVEWESNGQPENNYKTTPPMLDSDG
SFFLYSKLTVDKSRWQQGNVFSCSVMHEALHNHYTQKSLSLSPGAPAPAPAPAPAPAPAPA
PAPAGGRYVHDCFIAQVGDLCDLFLHGGGGSGGGGSGGGGSGGGGSGGVVCQDWEGVEL
CWQGG
SEQ ID NO: 8075 ZW1 A-(PA)10 IL-2Rβγc ligand
DKTHTCPPCPAPEAAGGPSVFLFPPKPKDTLMISRTPEVTCVVVDVSHEDPEVKFNWYVDG
VEVHNAKTKPREEQYNSTYRVVSVLTVLHQDWLNGKEYKCKVSNKALGAPIEKTISKAKG
QPREPQVYVYPPSRDELTKNQVSLTCLVKGFYPSDIAVEWESNGQPENNYKTTPPVLDSDG
SFALVSKLTVDKSRWQQGNVFSCSVMHEALHNHYTQKSLSLSPGAPAPAPAPAPAPAPAPA
PAPAGGLVDCFKVKVGELCDLFGGGGSGGVVCQDWEGVELCWQGG
SEQ ID NO: 8076 ZW1_B
DKTHTCPPCPAPEAAGGPSVFLFPPKPKDTLMISRTPEVTCVVVDVSHEDPEVKFNWYVDG
VEVHNAKTKPREEQYNSTYRVVSVLTVLHQDWLNGKEYKCKVSNKALGAPIEKTISKAKG
QPREPQVYVLPPSRDELTKNQVSLLCLVKGFYPSDIAVEWESNGQPENNYLTWPPVLDSDG
SFFLYSKLTVDKSRWQQGNVFSCSVMHEALHNHYTQKSLSLSPG
SEQ ID NO: 8077 Cys-Knob-(PA)10 IL-2Rβγc ligand
DKTHTCPPCPAPEAAGGPSVFLFPPKPKDTLMISRTPEVTCVVVDVSHEDPEVKFNWYVDG
VEVHNAKTKPREEQYNSTYRVVSVLTVLHQDWLNGKEYKCKVSNKALGAPIEKTISKAKG
QPREPQVYTLPPCRDELTKNQVSLWCLVKGFYPSDIAVEWESNGQPENNYKTTPPVLDSDG
SFFLYSKLTVDKSRWQQGNVFSCSVMHEALHNHYTQKSLSLSPGAPAPAPAPAPAPAPAPA
PAPAGGLVDCFKVKVGELCDLFGGGGSGGVVCQDWEGVELCWQGG
SEQ ID NO: 8078 Cys-Hole
DKTHTCPPCPAPEAAGGPSVFLFPPKPKDTLMISRTPEVTCVVVDVSHEDPEVKFNWYVDG
VEVHNAKTKPREEQYNSTYRVVSVLTVLHQDWLNGKEYKCKVSNKALGAPIEKTISKAKG
QPREPQVCTLPPSRDELTKNQVSLSCAVKGFYPSDIAVEWESNGQPENNYKTTPPVLDSDGS
FFLVSKLTVDKSRWQQGNVFSCSVMHEALHNHYTQKSLSLSPG
SEQ ID NO: 8079 ZW1_A-(PA)10 IL-2Rβγc ligand
DKTHTCPPCPAPEAAGGPSVFLFPPKPKDTLMISRTPEVTCVVVDVSHEDPEVKFNWYVDG
VEVHNAKTKPREEQYNSTYRVVSVLTVLHQDWLNGKEYKCKVSNKALGAPIEKTISKAKG
QPREPQVYVYPPSRDELTKNQVSLTCLVKGFYPSDIAVEWESNGQPENNYKTTPPVLDSDG
SFALVSKLTVDKSRWQQGNVFSCSVMHEALHNHYTQKSLSLSPGAPAPAPAPAPAPAPAPA
PAPAGGRYVHDCFIAQVGDLCDLFLHGGGGSGGVVCQDWEGVELCWQGG
SEQ ID NO: 8080 Cys-Knob-(PA)10 IL-2Rβγc ligand
DKTHTCPPCPAPEAAGGPSVFLFPPKPKDTLMISRTPEVTCVVVDVSHEDPEVKFNWYVDG
VEVHNAKTKPREEQYNSTYRVVSVLTVLHQDWLNGKEYKCKVSNKALGAPIEKTISKAKG
QPREPQVYTLPPCRDELTKNQVSLWCLVKGFYPSDIAVEWESNGQPENNYKTTPPVLDSDG
SFFLYSKLTVDKSRWQQGNVFSCSVMHEALHNHYTQKSLSLSPGAPAPAPAPAPAPAPAPA
PAPAGGRYVHDCFIAQVGDLCDLFLHGGGGSGGVVCQDWEGVELCWQGG
SEQ ID NO: 8081 ZW1_A-(GS)10 IL-2Rβγc ligand
DKTHTCPPCPAPEAAGGPSVFLFPPKPKDTLMISRTPEVTCVVVDVSHEDPEVKFNWYVDG
VEVHNAKTKPREEQYNSTYRVVSVLTVLHQDWLNGKEYKCKVSNKALGAPIEKTISKAKG
QPREPQVYVYPPSRDELTKNQVSLTCLVKGFYPSDIAVEWESNGQPENNYKTTPPVLDSDG
SFALVSKLTVDKSRWQQGNVFSCSVMHEALHNHYTQKSLSLSPGGSGSGSGSGSGSGSGSG
SGSGGWYSCWMAQLGELCDLDGGGGSGGVVCQDWEGVELCWQGG
SEQ ID NO: 8082 Cys-Knob-(GS)10 IL-2Rβγc ligand
DKTHTCPPCPAPEAAGGPSVFLFPPKPKDTLMISRTPEVTCVVVDVSHEDPEVKFNWYVDG
VEVHNAKTKPREEQYNSTYRVVSVLTVLHQDWLNGKEYKCKVSNKALGAPIEKTISKAKG
QPREPQVYTLPPCRDELTKNQVSLWCLVKGFYPSDIAVEWESNGQPENNYKTTPPVLDSDG
SFFLYSKLTVDKSRWQQGNVFSCSVMHEALHNHYTQKSLSLSPGGSGSGSGSGSGSGSGSG
SGSGGWYSCWMAQLGELCDLDGGGGSGGVVCQDWEGVELCWQGG

[0839] The components of the IL-2Rβγc ligand constructs having SEQ ID NOS: 8061-8082 is summarized in Table 7.

TABLE 7
Components of IL-2Rβγc ligand constructs.

| IL-2Rβγc | | | | | |
|---|---|---|---|---|---|
| Ligand | | | | IL-2Rβγc | |
| Construct | Construct | Linker | IL-2Rβ Ligand | Ligand Linker | IL-2Rβγc Ligand |
| SEQ ID NO: | hIgG2-Fc | (PA)10 | SEQ ID NO: | GGGGS | SEQ ID NO: 9340 |
| 8061 | | (SEQ ID | 2930 | (SEQ ID NO: | |
| | | NO: | | 9395) | |
| | | 9428) | | | |
| (SEQ ID NO: | hIgG2-Fc | (PA)10 | SEQ ID NO: | GGGGS | SEQ ID NO: 9340 |
| 8062 | | (SEQ ID | 2931 | SEQ ID NO: | |
| | | NO: | | 9395) | |
| | | 9428) | | | |
| SEQ ID NO: | hIgG2-Fc | (PA)10 | SEQ ID NO: | GGGGS | SEQ ID NO: 9340 |
| 8063 | | (SEQ ID | 2932 | (SEQ ID NO: | |
| | | NO: | | 9395) | |
| | | 9428) | | | |
| SEQ ID NO: | hIgG2-Fc | (PA)10 | (SEQ ID NO: | GGGGS | SEQ ID NO: 9340 |
| 8064 | | (SEQ ID | 2933 | SEQ ID NO: | |
| | | NO: | | 9395) | |
| | | 9428) | | | |
| SEQ ID NO: | hIgG2-Fc | (PA)10 | SEQ ID NO: | GGGGS | SEQ ID NO: 9340 |
| 8065 | | (SEQ ID | 2934 | (SEQ ID NO: | |
| | | NO: | | 9395) | |
| | | 9428) | | | |
| SEQ ID NO: | hIgG2-Fc | (PA)10 | SEQ ID NO: | GGGGS | SEQ ID NO: 9340 |
| 8066 | | (SEQ ID | 2935 | (SEQ ID NO: | |
| | | NO: | | 9395) | |
| | | 9428) | | | |
| SEQ ID NO: | hIgG2-Fc | (PA)10 | SEQ ID NO: | GGGGS | SEQ ID NO: 9340 |
| 8067 | | (SEQ ID | 2936 | (SEQ ID NO: | |
| | | NO: | | 9395) | |
| | | 9428) | | | |
| SEQ ID NO: | hIgG2-Fc | (PA)10 | SEQ ID NO: | GGGGS | SEQ ID NO: 9340 |
| 8068 | | (SEQ ID | 2937 | (SEQ ID NO: | |
| | | NO: | | 9395) | |
| | | 9428) | | | |
| SEQ ID NO: | hIgG2-Fc | (PA)10 | | (GGGGS)2 | |
| 8069 | | (SEQ ID | SEQ ID NO: | (SEQ ID NO: | SEQ ID NO: 9340 |
| | | NO: | 2930 | 9396) | |
| | | 9428) | | | |
| SEQ ID NO: | hIgG2-Fc | (PA)10 | SEQ ID NO: | (GGGGS)3 | SEQ ID NO: 9340 |
| 8070 | | (SEQ ID | 2930 | (SEQ ID NO: | |
| | | NO: | | 9397) | |
| | | 9428) | | | |
| SEQ ID NO: | hIgG2-Fc | (PA)10 | SEQ ID NO: | (GGGGS)4 | SEQ ID NO: 9340 |
| 8071 | | (SEQ ID | 2930 | (SEQ ID NO: | |
| | | NO: | | 9398) | |
| | | 9428) | | | |
| SEQ ID NO: | hIgG2-Fc | (PA)10 | SEQ ID NO: | (GGGGS)2 | SEQ ID NO: 9340 |
| 8072 | | (SEQ ID | 2934 | (SEQ ID NO: | |
| | | NO: | | 9396) | |
| | | 9428) | | | |
| SEQ ID NO: | hIgG2-Fc | (PA)10 | SEQ ID NO: | (GGGGS)3 | SEQ ID NO: 9340 |
| 8073 | | (SEQ ID | 2934 | (SEQ ID NO: | |
| | | NO: | | 9397) | |
| | | 9428) | | | |
| SEQ ID NO: | hIgG2-Fc | (PA)10 | SEQ ID NO: | (GGGGS)4 | SEQ ID NO: 9340 |
| 8074 | | (SEQ ID | 2934 | (SEQ ID NO: | |
| | | NO: | | 9398) | |
| | | 9428) | | | |
| SEQ ID NO: | ZW1_A | (PA)10 | SEQ ID NO: | GGGGS | SEQ ID NO: 9340 |
| 8075 | | (SEQ ID | 2938 | (SEQ ID NO: | |
| | | NO: | | 9395) | |
| | | 9428) | | | |
| SEQ ID NO: | ZW1_B | — | — | — | — |
| 8076 | | | | | |
| SEQ ID NO: | Cys- | (PA)10 | SEQ ID NO: | GGGGS | SEQ ID NO: 9340 |
| 8077 | Knob | (SEQ ID | 2934 | (SEQ ID NO: | |
| | | NO: | | 9395) | |
| | | 9428) | | | |
| SEQ ID NO: | Cys-Hole | — | — | — | — |
| 8078 | | | | | |
| SEQ ID NO: | ZW1-A | (PA)10 | SEQ ID NO: | GGGGS | SEQ ID NO: 9340 |
| 8079 | | (SEQ ID | 2934 | (SEQ ID NO: | |
| | | NO: | | 9395) | |
| | | 9428) | | | |
| SEQ ID NO: | Cys- | (PA)10 | SEQ ID NO: | GGGGS | SEQ ID NO: 9340 |
| 8080 | Knob | (SEQ ID | 2934 | (SEQ ID NO: | |
| | | NO: | | 9395) | |
| | | 9428) | | | |
| SEQ ID NO: | ZW1_A | (GS)10 | SEQ ID NO: | GGGGS | SEQ ID NO: 9340 |
| 8081 | | (SEQ ID | 2939 | (SEQ ID NO: | |
| | | NO: | | 9395) | |
| | | 9407) | | | |
| SEQ ID NO: | Cys- | (GS)10 | SEQ ID NO: | GGGGS | SEQ ID NO: 9340 |
| 8082 | Knob | (SEQ ID | 2939 | (SEQ ID NO: | |
| | | NO: | | 9395) | |
| | | 9407) | | | |

[0840] Additional examples of IL-2Rβγc ligand constructs comprising an IL-2Rβγc ligand bound to a construct partner are provided in Table 8.

TABLE 8
Components of IL-2Rβγc ligand constructs.

| | | | SEQ ID NO: | | SEQ ID NO: |
|---|---|---|---|---|---|
| SEQ ID NO: 8100 | hIgG2-Fc | (PA)10 | 3115 | (GGGGS)3 | 9342 |
| | | SEQ ID NO: | | SEQ ID NO: | |
| | | 9428 | | 9397 | |
| SEQ ID NO: 8101 | hIgG2-Fc | (PA)10 | 3115 | (PA)8G | 9342 |
| | | SEQ ID NO: | | SEQ ID NO: | |
| | | 9428 | | 1464 | |
| SEQ ID NO: 8102 | ZW1_A | (PA)10 | 3115 | (GGGGS)3 | 9342 |
| | | SEQ ID NO: | | SEQ ID NO: | |
| | | 9428 | | 9397 | |
| SEQ ID NO: 8103 | ZWl_A | (PA)10 | 3115 | (PA)8G | 9342 |
| | | SEQ ID NO: | | SEQ ID NO: | |
| | | 9428 | | 1464 | |
| SEQ ID NO: 8104 | Cys-Knob | (PA)10 | 3115 | (GGGGS)3 | 9342 |
| | | SEQ ID NO: | | SEQ ID NO: | |
| | | 9428 | | 9397 | |
| SEQ ID NO: 8105 | Cys-Knob | (PA)10 | 3115 | (PA)8G | 9342 |
| | | SEQ ID NO: | | SEQ ID NO: | |
| | | 9428 | | 1464 | |
| SEQ ID NO: 8106 | hIgG2-Fc | (GS)10 | 3115 | (PA)8G | 9342 |
| | | SEQ ID NO: | | SEQ ID NO: | |
| | | 9407 | | 1464 | |
| SEQ ID NO: 8107 | hIgG2-Fc | (GS)10 | 3126 | (PA)8G | 9342 |
| | | SEQ ID NO: | | SEQ ID NO: | |
| | | 9407 | | 1464 | |
| SEQ ID NO: 8108 | hIgG2-Fc | (GS)10 | 3127 | (PA)8G | 9342 |
| | | SEQ ID NO: | | SEQ ID NO: | |
| | | 9407 | | 1464 | |
| SEQ ID NO: 8109 | hIgG2-Fc | (GS)10 | 3137 | (PA)8G | 9342 |
| | | SEQ ID NO: | | SEQ ID NO: | |
| | | 9407 | | 1464 | |
| SEQ ID NO: 8110 | hIgG2-Fc | (PA)10 | 3137 | (PA)8G | 9342 |
| | | SEQ ID NO: | | SEQ ID NO: | |
| | | 9428 | | 1464 | |
| SEQ ID NO: 8111 | hIgG4-Fc | — | 3115 | (PA)8G | 9342 |
| | | | | SEQ ID NO: | |
| | | | | 1464 | |
| SEQ ID NO: 8112 | hIgG2-Fc | (PA)10 | 3115 | (PA)8G | 9342 |
| | | SEQ ID NO: | | SEQ ID NO: | |
| | | 9428 | | 1464 | |
| SEQ ID NO: 8113 | hIgG2-Fc | (PA)10 | 3128 | (PA)8G | 9342 |
| | | SEQ ID NO: | | SEQ ID NO: | |
| | | 9428 | | 1464 | |
| SEQ ID NO: 8114 | hIgG2-Fc | (GS)10 | 3170 | (PA)8G | 9342 |
| | | SEQ ID NO: | | SEQ ID NO: | |
| | | 9407 | | 1464 | |
| SEQ ID NO: 8115 | hIgG2-Fc | (GS)10 | 3183 | (PA)8G | 9342 |
| | | SEQ ID NO: | | SEQ ID NO: | |
| | | 9407 | | 1464 | |
| SEQ ID NO: 8116 | hIgG2-Fc | (GS)10 | 3186 | (PA)8G | 9342 |
| | | SEQ ID NO: | | SEQ ID NO: | |
| | | 9407 | | 1464 | |
| SEQ ID NO: 8117 | hIgG2-Fc | (GS)10 | 3173 | (PA)8G | 9342 |
| | | SEQ ID NO: | | SEQ ID NO: | |
| | | 9407 | | 1464 | |
| SEQ ID NO: 8118 | hIgG2-Fc | (GS)10 | 3184 | (PA)8G | 9342 |
| | | SEQ ID NO: | | SEQ ID NO: | |
| | | 9407 | | 1464 | |
| SEQ ID NO: 8119 | hIgG2-Fc | (GS)10 | 3178 | (PA)8G | 9342 |
| | | SEQ ID NO: | | SEQ ID NO: | |
| | | 9407 | | 1464 | |
| SEQ ID NO: 8120 | Cys-Knob | (GS)10 | 3170 | (PA)8G | 9342 |
| | | SEQ ID NO: | | SEQ ID NO: | |
| | | 9407 | | 1464 | |
| SEQ ID NO: 8121 | Cys-Knob | (GS)10 | 3182 | (PA)8G | 9342 |
| | | SEQ ID NO: | | SEQ ID NO: | |
| | | 9407 | 3185 | 1464 | |
| SEQ ID NO: 8122 | Cys-Knob | (GS)10 | | (PA)8G | 9342 |
| | | SEQ ID NO: | | SEQ ID NO: | |
| | | 9407 | | 1464 | |
| SEQ ID NO: 8123 | Cys-Knob | (GS)10 | 3173 | (PA)8G | 9342 |
| | | SEQ ID NO: | | SEQ ID NO: | |
| | | 9407 | | 1464 | |
| SEQ ID NO: 8124 | Cys-Knob | (GS)10 | 3183 | (PA)8G | 9342 |
| | | SEQ ID NO: | | SEQ ID NO: | |
| | | 9407 | | 1464 | |
| SEQ ID NO: 8125 | Cys-Knob | (GS)10 | 3178 | (PA)8G | 9342 |
| | | SEQ ID NO: | | SEQ ID NO: | |
| | | 9407 | | 1464 | |
| SEQ ID NO: 8126 | Cys-Knob | (GGGGS)2 | 2940 | (PA)8G | 9342 |
| | | SEQ ID NO: | | SEQ ID NO: | |
| | | 9396 | | 1464 | |

[0841] The amino acid sequences of the construct partners and IL-2Rβγc ligand constructs are provided in Table 9.

TABLE 9
IL-2Rβγc immunoglobulin constructs.

SEQ ID NO: 8090 hIgG2-Fc
ERKSSVECPPCPAPPVAGPSVFLFPPKPKDTLMISRTPEVTCVVVDVSHEDPEVQFNWYV
DGVEVHNAKTKPREEQFNSTFRVVSVLTVVHQDWLNGKEYKCKVSNKGLPAPIEKTISK
TKGQPREPQVYTLPPSREEMTKNQVSLTCLVKGFYPSDIAVEWESNGQPENNYKTTPPML
DSDGSFFLYSKLTVDKSRWQQGNVFSCSVMHEALHNHYTQKSLSLSPG
SEQ ID NO: 8091 ZW1_A
DKTHTCPPCPAPEAAGGPSVFLFPPKPKDTLMISRTPEVTCVVVDVSHEDPEVKFNWYVD
GVEVHNAKTKPREEQYNSTYRVVSVLTVLHQDWLNGKEYKCKVSNKALGAPIEKTISK
AKGQPREPQVYVYPPSRDELTKNQVSLTCLVKGFYPSDIAVEWESNGQPENNYKTTPPVL
DSDGSFALVSKLTVDKSRWQQGNVFSCSVMHEALHNHYTQKSLSLSPG
SEQ ID NO: 8092 Cys-Knob
DKTHTCPPCPAPEAAGGPSVFLFPPKPKDTLMISRTPEVTCVVVDVSHEDPEVKFNWYVD
GVEVHNAKTKPREEQYNSTYRVVSVLTVLHQDWLNGKEYKCKVSNKALGAPIEKTISK
AKGQPREPQVYTLPPCRDELTKNQVSLWCLVKGFYPSDIAVEWESNGQPENNYKTTPPV
LDSDGSFFLYSKLTVDKSRWQQGNVFSCSVMHEALHNHYTQKSLSLSPG
SEQ ID NO: 8078 Cys-Hole
DKTHTCPPCPAPEAAGGPSVFLFPPKPKDTLMISRTPEVTCVVVDVSHEDPEVKFNWYVD
GVEVHNAKTKPREEQYNSTYRVVSVLTVLHQDWLNGKEYKCKVSNKALGAPIEKTISK
AKGQPREPQVCTLPPSRDELTKNQVSLSCAVKGFYPSDIAVEWESNGQPENNYKTTPPVL
DSDGSFFLVSKLTVDKSRWQQGNVFSCSVMHEALHNHYTQKSLSLSPG
SEQ ID NO: 8093 hIgG4
APPCPPCPAPEFEGGPSVFLFPPKPKDTLMISRTPEVTCVVVDVSQEDPEVQFNWYVDGV
EVHNAKTKPREEQFNSTYRVVSVLTVLHQDWLNGKEYKCKVSNKGLGSSIEKTISKAKG
QPREPQVYTLPPSQEEMTKNQVSLTCLVKGFYPSDIAVEWESNGQPENNYKTTPPVLDSD
GSFFLYSRLTVDKSRWQEGNVFSCSVMHEALHNHYTQKSLSLSLGART
SEQ ID NO: 8100 hIgG2-Fc-(GS)10-3115/9340 (PA8)G linker
ERKSSVECPPCPAPPVAGPSVFLFPPKPKDTLMISRTPEVTCVVVDVSHEDPEVQFNWYV
DGVEVHNAKTKPREEQFNSTFRVVSVLTVVHQDWLNGKEYKCKVSNKGLPAPIEKTISK
TKGQPREPQVYTLPPSREEMTKNQVSLTCLVKGFYPSDIAVEWESNGQPENNYKTTPPML
DSDGSFFLYSKLTVDKSRWQQGNVFSCSVMHEALHNHYTQKSLSLSPG-(PA)10-
GGGELLVDCFKVKVGELCDLFFG-(GGGGS)3GG-VVCQDWEGVELCWQGG
SEQ ID NO: 8101 hIgG2-Fc-(GS)10-3115/9342 (PA8)G linker
ERKSSVECPPCPAPPVAGPSVFLFPPKPKDTLMISRTPEVTCVVVDVSHEDPEVQFNWYV
DGVEVHNAKTKPREEQFNSTFRVVSVLTVVHQDWLNGKEYKCKVSNKGLPAPIEKTISK
TKGQPREPQVYTLPPSREEMTKNQVSLTCLVKGFYPSDIAVEWESNGQPENNYKTTPPML
DSDGSFFLYSKLTVDKSRWQQGNVFSCSVMHEALHNHYTQKSLSLSPG-(PA)10-
GGGELLVDCFKVKVGELCDLFFG-(PA)8G-VVCQDWEGVELCWQGG
SEQ ID NO: 8102 hIgG2-Fc-(GS)10-3115/9342 (PA8)G linker
DKTHTCPPCPAPEAAGGPSVFLFPPKPKDTLMISRTPEVTCVVVDVSHEDPEVKFNWYVD
GVEVHNAKTKPREEQYNSTYRVVSVLTVLHQDWLNGKEYKCKVSNKALGAPIEKTISK
AKGQPREPQVYVYPPSRDELTKNQVSLTCLVKGFYPSDIAVEWESNGQPENNYKTTPPVL
DSDGSFALVSKLTVDKSRWQQGNVFSCSVMHEALHNHYTQKSLSLSPG-(PA)10-
GGGELLVDCFKVKVGELCDLFFG-(GGGGS)3GG-VVCQDWEGVELCWQGG
SEQ ID NO: 8103 hIgG2-Fc-(GS)10-3115/9342 (PA8)G linker
DKTHTCPPCPAPEAAGGPSVFLFPPKPKDTLMISRTPEVTCVVVDVSHEDPEVKFNWYVD
GVEVHNAKTKPREEQYNSTYRVVSVLTVLHQDWLNGKEYKCKVSNKALGAPIEKTISK
AKGQPREPQVYVYPPSRDELTKNQVSLTCLVKGFYPSDIAVEWESNGQPENNYKTTPPVL
DSDGSFALVSKLTVDKSRWQQGNVFSCSVMHEALHNHYTQKSLSLSPG-(PA)10-
GGGELLVDCFKVKVGELCDLFFG-(PA)8G-VVCQDWEGVELCWQGG
SEQ ID NO: 8104 hIgG2-Fc-(GS)10-3115/9342 (PA8)G linker
DKTHTCPPCPAPEAAGGPSVFLFPPKPKDTLMISRTPEVTCVVVDVSHEDPEVKFNWYVD
GVEVHNAKTKPREEQYNSTYRVVSVLTVLHQDWLNGKEYKCKVSNKALGAPIEKTISK
AKGQPREPQVYTLPPCRDELTKNQVSLWCLVKGFYPSDIAVEWESNGQPENNYKTTPPV
LDSDGSFFLYSKLTVDKSRWQQGNVFSCSVMHEALHNHYTQKSLSLSPG-(PA)10-
GGGELLVDCFKVKVGELCDLFFG-(GGGGS)3GG-VVCQDWEGVELCWQGG
SEQ ID NO: 8105 hIgG2-Fc-(GS)10-3115/9342 (PA8)G linker
DKTHTCPPCPAPEAAGGPSVFLFPPKPKDTLMISRTPEVTCVVVDVSHEDPEVKFNWYVD
GVEVHNAKTKPREEQYNSTYRVVSVLTVLHQDWLNGKEYKCKVSNKALGAPIEKTISK
AKGQPREPQVYTLPPCRDELTKNQVSLWCLVKGFYPSDIAVEWESNGQPENNYKTTPPV
LDSDGSFFLYSKLTVDKSRWQQGNVFSCSVMHEALHNHYTQKSLSLSPG-(PA)10-
GGGELLVDCFKVKVGELCDLFFG-(PA)8G-VVCQDWEGVELCWQGG
SEQ ID NO: 8106 hIgG2-Fc-(PA)10-3115/9342 (PA8)G linker
ERKSSVECPPCPAPPVAGPSVFLFPPKPKDTLMISRTPEVTCVVVDVSHEDPEVQFNWYV
DGVEVHNAKTKPREEQFNSTFRVVSVLTVVHQDWLNGKEYKCKVSNKGLPAPIEKTISK
TKGQPREPQVYTLPPSREEMTKNQVSLTCLVKGFYPSDIAVEWESNGQPENNYKTTPPML
DSDGSFFLYSKLTVDKSRWQQGNVFSCSVMHEALHNHYTQKSLSLSPG-(PA)10-
GGGELLVDCFKVKVGELCDLFFG-(PA)8G-VVCQDWEGVELCWQGG
SEQ ID NO: 8107 hIgG2-Fc-(GS)10-3126/9342 (PA8)G linker
ERKSSVECPPCPAPPVAGPSVFLFPPKPKDTLMISRTPEVTCVVVDVSHEDPEVQFNWYV
DGVEVHNAKTKPREEQFNSTFRVVSVLTVVHQDWLNGKEYKCKVSNKGLPAPIEKTISK
TKGQPREPQVYTLPPSREEMTKNQVSLTCLVKGFYPSDIAVEWESNGQPENNYKTTPPML
DSDGSFFLYSKLTVDKSRWQQGNVFSCSVMHEALHNHYTQKSLSLSPG-(PA)10-
LVDCFKVKVGELCDLFFGGG-(PA)8G-VVCQDWEGVELCWQGG
SEQ ID NO: 8108 hIgG2-Fc-(PA)10-3127/9342 (PA8)G linker
ERKSSVECPPCPAPPVAGPSVFLFPPKPKDTLMISRTPEVTCVVVDVSHEDPEVQFNWYV
DGVEVHNAKTKPREEQFNSTFRVVSVLTVVHQDWLNGKEYKCKVSNKGLPAPIEKTISK
TKGQPREPQVYTLPPSREEMTKNQVSLTCLVKGFYPSDIAVEWESNGQPENNYKTTPPML
DSDGSFFLYSKLTVDKSRWQQGNVFSCSVMHEALHNHYTQKSLSLSPG-(PA)10-
VDCFKVKVGELCDLFFGGG-(PA)8G-VVCQDWEGVELCWQGG
SEQ ID NO: 8109 hIgG2-Fc-(GS)10-3137/9342 (PA8)G linker
ERKSSVECPPCPAPPVAGPSVFLFPPKPKDTLMISRTPEVTCVVVDVSHEDPEVQFNWYV
DGVEVHNAKTKPREEQFNSTFRVVSVLTVVHQDWLNGKEYKCKVSNKGLPAPIEKTISK
TKGQPREPQVYTLPPSREEMTKNQVSLTCLVKGFYPSDIAVEWESNGQPENNYKTTPPML
DSDGSFFLYSKLTVDKSRWQQGNVFSCSVMHEALHNHYTQKSLSLSPG-(PA)10-
GGRYVHDCFIAQVGDLCDLFLH-(PA)8G-VVCQDWEGVELCWQGG
SEQ ID NO: 8110 hIgG2-Fc-(PA)10-3137/9342 (PA8)G linker
ERKSSVECPPCPAPPVAGPSVFLFPPKPKDTLMISRTPEVTCVVVDVSHEDPEVQFNWYV
DGVEVHNAKTKPREEQFNSTFRVVSVLTVVHQDWLNGKEYKCKVSNKGLPAPIEKTISK
TKGQPREPQVYTLPPSREEMTKNQVSLTCLVKGFYPSDIAVEWESNGQPENNYKTTPPML
DSDGSFFLYSKLTVDKSRWQQGNVFSCSVMHEALHNHYTQKSLSLSPG-(PA)10-
GGRYVHDCFIAQVGDLCDLFLH-(PA)8G-VVCQDWEGVELCWQGG
SEQ ID NO: 8111 hIgG4-Fc-(PA)10-3115/9342 (PA8)G linker
APPCPPCPAPEFEGGPSVFLFPPKPKDTLMISRTPEVTCVVVDVSQEDPEVQFNWYVDGV
EVHNAKTKPREEQFNSTYRVVSVLTVLHQDWLNGKEYKCKVSNKGLGSSIEKTISKAKG
QPREPQVYTLPPSQEEMTKNQVSLTCLVKGFYPSDIAVEWESNGQPENNYKTTPPVLDSD
GSFFLYSRLTVDKSRWQEGNVFSCSVMHEALHNHYTQKSLSLSLGART-
GGGELLVDCFKVKVGELCDLFFG-(PA)8G-VVCQDWEGVELCWQGG
SEQ ID NO: 8112 hIgG2-Fc-(PA)10-3115/9342 (PA8)G linker
ERKSSVECPPCPAPPVAGPSVFLFPPKPKDTLMISRTPEVTCVVVDVSHEDPEVQFNWYV
DGVEVHNAKTKPREEQFNSTFRVVSVLTVVHQDWLNGKEYKCKVSNKGLPAPIEKTISK
TKGQPREPQVYTLPPSREEMTKNQVSLTCLVKGFYPSDIAVEWESNGQPENNYKTTPPML
DSDGSFFLYSKLTVDKSRWQQGNVFSCSVMHEALHNHYTQKSLSLSPG-(PA)10-
GGGELLVDCFKVKVGELCDLFFG-(PA)8G-VVCQDWEGVELCWQGG
SEQ ID NO: 8113 hIgG2-Fc-(PA)10-3128/9342 (PA8)G linker
ERKSSVECPPCPAPPVAGPSVFLFPPKPKDTLMISRTPEVTCVVVDVSHEDPEVQFNWYV
DGVEVHNAKTKPREEQFNSTFRVVSVLTVVHQDWLNGKEYKCKVSNKGLPAPIEKTISK
TKGQPREPQVYTLPPSREEMTKNQVSLTCLVKGFYPSDIAVEWESNGQPENNYKTTPPML
DSDGSFFLYSKLTVDKSRWQQGNVFSCSVMHEALHNHYTQKSLSLSPG-(PA)10-
GGELLVDCFRVRVGELCDLFFGGG-(PA)8G-VVCQDWEGVELCWQGG
SEQ ID NO: 8114 hIgG2-Fc-(GS)10-3170/9342 (PA8)G linker
ERKSSVECPPCPAPPVAGPSVFLFPPKPKDTLMISRTPEVTCVVVDVSHEDPEVQFNWYV
DGVEVHNAKTKPREEQFNSTFRVVSVLTVVHQDWLNGKEYKCKVSNKGLPAPIEKTISK
TKGQPREPQVYTLPPSREEMTKNQVSLTCLVKGFYPSDIAVEWESNGQPENNYKTTPPML
DSDGSFFLYSKLTVDKSRWQQGNVFSCSVMHEALHNHYTQKSLSLSPG-(GS)10-
GGRYVHDCFAAQVGDLCDLFLHGG-(PA)8G-VVCQDWEGVELCWQGG
SEQ ID NO: 8115 hIgG2-Fc-(GS)10-3183/9342 (PA8)G linker
ERKSSVECPPCPAPPVAGPSVFLFPPKPKDTLMISRTPEVTCVVVDVSHEDPEVQFNWYV
DGVEVHNAKTKPREEQFNSTFRVVSVLTVVHQDWLNGKEYKCKVSNKGLPAPIEKTISK
TKGQPREPQVYTLPPSREEMTKNQVSLTCLVKGFYPSDIAVEWESNGQPENNYKTTPPML
DSDGSFFLYSKLTVDKSRWQQGNVFSCSVMHEALHNHYTQKSLSLSPG-(GS)10-
GGRYVHDCFIAQVGDLCDLFLAGG-(PA)8G-VVCQDWEGVELCWQGG
SEQ ID NO: 8116 hIgG2-Fc-(GS)10-3186/9342 (PA8)G linker
ERKSSVECPPCPAPPVAGPSVFLFPPKPKDTLMISRTPEVTCVVVDVSHEDPEVQFNWYV
DGVEVHNAKTKPREEQFNSTFRVVSVLTVVHQDWLNGKEYKCKVSNKGLPAPIEKTISK
TKGQPREPQVYTLPPSREEMTKNQVSLTCLVKGFYPSDIAVEWESNGQPENNYKTTPPML
DSDGSFFLYSKLTVDKSRWQQGNVFSCSVMHEALHNHYTQKSLSLSPG-(GS)10-
GGRYVHDCFIAQVGDLCDAFLHGG-(PA)8G-VVCQDWEGVELCWQGG
SEQ ID NO: 8117 hIgG2-Fc-(GS)10-3173/9342 (PA8)G linker
ERKSSVECPPCPAPPVAGPSVFLFPPKPKDTLMISRTPEVTCVVVDVSHEDPEVQFNWYV
DGVEVHNAKTKPREEQFNSTFRVVSVLTVVHQDWLNGKEYKCKVSNKGLPAPIEKTISK
TKGQPREPQVYTLPPSREEMTKNQVSLTCLVKGFYPSDIAVEWESNGQPENNYKTTPPML
DSDGSFFLYSKLTVDKSRWQQGNVFSCSVMHEALHNHYTQKSLSLSPG-(GS)10-
GGRYVHDCFIAAVGDLCDLFLHGG-(PA)8G-VVCQDWEGVELCWQGG
SEQ ID NO: 8118 hIgG2-Fc-(GS)10-3184/9342 (PA)8G linker
ERKSSVECPPCPAPPVAGPSVFLFPPKPKDTLMISRTPEVTCVVVDVSHEDPEVQFNWYV
DGVEVHNAKTKPREEQFNSTFRVVSVLTVVHQDWLNGKEYKCKVSNKGLPAPIEKTISK
TKGQPREPQVYTLPPSREEMTKNQVSLTCLVKGFYPSDIAVEWESNGQPENNYKTTPPML
DSDGSFFLYSKLTVDKSRWQQGNVFSCSVMHEALHNHYTQKSLSLSPG-(GS)10-
GGRYVHDCFIAQVGDLCDLFAHGG-(PA)8G-VVCQDWEGVELCWQGG
SEQ ID NO: 8119 hIgG2-Fc-(GS)10-3178/9342 (PA8)G linker
ERKSSVECPPCPAPPVAGPSVFLFPPKPKDTLMISRTPEVTCVVVDVSHEDPEVQFNWYV
DGVEVHNAKTKPREEQFNSTFRVVSVLTVVHQDWLNGKEYKCKVSNKGLPAPIEKTISK
TKGQPREPQVYTLPPSREEMTKNQVSLTCLVKGFYPSDIAVEWESNGQPENNYKTTPPML
DSDGSFFLYSKLTVDKSRWQQGNVFSCSVMHEALHNHYTQKSLSLSPG-(GS)10-
GGAYVHDCFIAQVGDLCDLFLHGG-(PA)8G-VVCQDWEGVELCWQGG
SEQ ID NO: 8120 Cys-Knob-Fc-(GS)10-3170/9342 (PA8)G linker
DKTHTCPPCPAPEAAGGPSVFLFPPKPKDTLMISRTPEVTCVVVDVSHEDPEVKFNWYVD
GVEVHNAKTKPREEQYNSTYRVVSVLTVLHQDWLNGKEYKCKVSNKALGAPIEKTISK
AKGQPREPQVYTLPPCRDELTKNQVSLWCLVKGFYPSDIAVEWESNGQPENNYKTTPPV
LDSDGSFFLYSKLTVDKSRWQQGNVFSCSVMHEALHNHYTQKSLSLSPG-(GS )10-
GGRYVHDCFIGQVGDLCDLFLHGG-(PA)8G-VVCQDWEGVELCWQGG
SEQ ID NO: 8121 Cys-Knob-Fc-(GS)10-3182/9342 (PA8)G linker
DKTHTCPPCPAPEAAGGPSVFLFPPKPKDTLMISRTPEVTCVVVDVSHEDPEVKFNWYVD
GVEVHNAKTKPREEQYNSTYRVVSVLTVLHQDWLNGKEYKCKVSNKALGAPIEKTISK
AKGQPREPQVYTLPPCRDELTKNQVSLWCLVKGFYPSDIAVEWESNGQPENNYKTTPPV
LDSDGSFFLYSKLTVDKSRWQQGNVFSCSVMHEALHNHYTQKSLSLSPG-(GS )10-
GGRYVHDCFIAQVGDLCDLFLAGG-(PA)8G-VVCQDWEGVELCWQGG
SEQ ID NO: 8122 Cys-Knob-Fc-(GS)10-3185/9342 (PA8)G linker
DKTHTCPPCPAPEAAGGPSVFLFPPKPKDTLMISRTPEVTCVVVDVSHEDPEVKFNWYVD
GVEVHNAKTKPREEQYNSTYRVVSVLTVLHQDWLNGKEYKCKVSNKALGAPIEKTISK
AKGQPREPQVYTLPPCRDELTKNQVSLWCLVKGFYPSDIAVEWESNGQPENNYKTTPPV
LDSDGSFFLYSKLTVDKSRWQQGNVFSCSVMHEALHNHYTQKSLSLSPG-(GS )10-
GGRYVHDCFIAQVGDLCDAFLHGG-(PA)8G-VVCQDWEGVELCWQGG
SEQ ID NO: 8123 Cys-Knob-Fc-(GS)10-3173/9342 (PA8)G linker
DKDKTHTCPPCPAPEAAGGPSVFLFPPKPKDTLMISRTPEVTCVVVDVSHEDPEVKFNWY
VDGVEVHNAKTKPREEQYNSTYRVVSVLTVLHQDWLNGKEYKCKVSNKALGAPIEKTI
SKAKGQPREPQVYTLPPCRDELTKNQVSLWCLVKGFYPSDIAVEWESNGQPENNYKTTP
PVLDSDGSFFLYSKLTVDKSRWQQGNVFSCSVMHEALHNHYTQKSLSLSPG-(GS)10-
GGRYVHDCFIAAVGDLCDLFLHGG-(PA)8G-VVCQDWEGVELCWQGG
SEQ ID NO: 8124 Cys-Knob-Fc-(GS)10-3183/9342 (PA8)G linker
DKDKTHTCPPCPAPEAAGGPSVFLFPPKPKDTLMISRTPEVTCVVVDVSHEDPEVKFNWY
VDGVEVHNAKTKPREEQYNSTYRVVSVLTVLHQDWLNGKEYKCKVSNKALGAPIEKTI
SKAKGQPREPQVYTLPPCRDELTKNQVSLWCLVKGFYPSDIAVEWESNGQPENNYKTTP
PVLDSDGSFFLYSKLTVDKSRWQQGNVFSCSVMHEALHNHYTQKSLSL SPG-(GS)10-
GGRYVHDCFIAQVGDLCDLFAHGG-(PA)8G-VVCQDWEGVELCWQGG
SEQ ID NO: 8125 Cys-Knob-Fc-(GS)10-3178/9342 (PA8)G linker
DKTHTCPPCPAPEAAGGPSVFLFPPKPKDTLMISRTPEVTCVVVDVSHEDPEVKFNWYVD
GVEVHNAKTKPREEQYNSTYRVVSVLTVLHQDWLNGKEYKCKVSNKALGAPIEKTISK
AKGQPREPQVYTLPPCRDELTKNQVSLWCLVKGFYPSDIAVEWESNGQPENNYKTTPPV
LDSDGSFFLYSKLTVDKSRWQQGNVFSCSVMHEALHNHYTQKSLSLSPG-(GS )10-
GGAYVHDCFIAQVGDLCDLFLHGG-(PA)8G-VVCQDWEGVELCWQGG
SEQ ID NO: 8126 Cys-Knob-Fc-(GGGGS)2-3170/9342 (PA8)G linker
DKTDKTHTCPPCPAPEAAGGPSVFLFPPKPKDTLMISRTPEVTCVVVDVSHEDPEVKFNW
YVDGVEVHNAKTKPREEQYNSTYRVVSVLTVLHQDWLNGKEYKCKVSNKALGAPIEKT
ISKAKGQPREPQVYTLPPCRDELTKNQVSLWCLVKGFYPSDIAVEWESNGQPENNYKTTP
PVLDSDGSFFLYSKLTVDKSRWQQGNVFSCSVMHEALHNHYTQKSLSLSPG-(GS)10-
GGRYLYDCFLALVGDLCVKFHQ-(PA)8G-VVCQDWEGVELCWQGG

[0842] The amino acid sequences of the construct partners and IL-2Rβγc ligand constructs are provided in Table 10.

TABLE 10
IL-2Rβγc immunoglobulin constructs.

SEQ ID NO: 8127 hIgG2-Fc-(PA)10-3115/9342 (PA)8G linker
ERKSSVECPPCPAPPVAGPSVFLFPPKPKDTLMISRTPEVTCVVVDVSHEDPEVQFNWYVDGV
EVHNAKTKPREEQFNSTFRVVSVLTVVHQDWLNGKEYKCKVSNKGLPAPIEKTISKTKGQPR
EPQVYTLPPSREEMTKNQVSLTCLVKGFYPSDIAVEWESNGQPENNYKTTPPMLDSDGSFFLY
SKLTVDKSRWQQGNVFSCSVMHEALHNHYTQKSLSLSPGA-(GS)10-
GGGELLVDCFKVKVGELCDLFFG-(PA)8G-VVCQDWEGVELCWQGG
SEQ ID NO: 8128 hIgG2-Fc-(GS)10-3137/9342 (PA)8G linker
ERKSSVECPPCPAPPVAGPSVFLFPPKPKDTLMISRTPEVTCVVVDVSHEDPEVQFNWYVDGV
EVHNAKTKPREEQFNSTFRVVSVLTVVHQDWLNGKEYKCKVSNKGLPAPIEKTISKTKGQPR
EPQVYTLPPSREEMTKNQVSLTCLVKGFYPSDIAVEWESNGQPENNYKTTPPMLDSDGSFFLY
SKLTVDKSRWQQGNVFSCSVMHEALHNHYTQKSLSLSPGA-(GS)10-
GGRYVHDCFIAQVGDLCDLFLH-(PA)8G-VVCQDWEGVELCWQGG
SEQ ID NO: 8129 hIgG2-Fc-(GS)10-3170/9342 (PA)8G linker
ERKSSVECPPCPAPPVAGPSVFLFPPKPKDTLMISRTPEVTCVVVDVSHEDPEVQFNWYVDGV
EVHNAKTKPREEQFNSTFRVVSVLTVVHQDWLNGKEYKCKVSNKGLPAPIEKTISKTKGQPR
EPQVYTLPPSREEMTKNQVSLTCLVKGFYPSDIAVEWESNGQPENNYKTTPPMLDSDGSFFLY
SKLTVDKSRWQQGNVFSCSVMHEALHNHYTQKSLSLSPGA-(GS)10-
GGRYVHDCFAAQVGDLCDLFLHGG-(PA)8G-VVCQDWEGVELCWQGG
SEQ ID NO: 8130 hIgG2-Fc-(GS)10-3182/9342 (PA)8G linker
ERKSSVECPPCPAPPVAGP SVFLFPPKPKDTLMISRTPEVTCVVVDVSHEDPEVQFNWYVDGV
EVHNAKTKPREEQFNSTFRVVSVLTVVHQDWLNGKEYKCKVSNKGLPAPIEKTISKTKGQPR
EPQVYTLPPSREEMTKNQVSLTCLVKGFYPSDIAVEWESNGQPENNYKTTPPMLDSDGSFFLY
SKLTVDKSRWQQGNVFSCSVMHEALHNHYTQKSLSLSPGA-(GS)10-
GGRYVHDCFIAQVGDLCDLFLAGG-(PA)8G-VVCQDWEGVELCWQGG
SEQ ID NO: 8131 hIgG2-Fc-(GS)10-3185/9342 (PA)8G linker
ERKSSVECPPCPAPPVAGPSVFLFPPKPKDTLMISRTPEVTCVVVDVSHEDPEVQFNWYVDGV
EVHNAKTKPREEQFNSTFRVVSVLTVVHQDWLNGKEYKCKVSNKGLPAPIEKTISKTKGQPR
EPQVYTLPPSREEMTKNQVSLTCLVKGFYPSDIAVEWESNGQPENNYKTTPPMLDSDGSFFLY
SKLTVDKSRWQQGNVFSCSVMHEALHNHYTQKSLSLSPGA-(GS)10-
GGRYVHDCFIAQVGDLCDAFLHGG-(PA)8G-VVCQDWEGVELCWQGG
SEQ ID NO: 8132 hIgG2-Fc-(GS)10-3172/9342 (PA)8G linker
ERKSSVECPPCPAPPVAGPSVFLFPPKPKDTLMISRTPEVTCVVVDVSHEDPEVQFNWYVDGV
EVHNAKTKPREEQFNSTFRVVSVLTVVHQDWLNGKEYKCKVSNKGLPAPIEKTISKTKGQPR
EPQVYTLPPSREEMTKNQVSLTCLVKGFYPSDIAVEWESNGQPENNYKTTPPMLDSDGSFFLY
SKLTVDKSRWQQGNVFSCSVMHEALHNHYTQKSLSLSPGA-(GS)10-
GGRYVHDCFIAAVGDLCDLFLHGG-(PA)8G-VVCQDWEGVELCWQGG
SEQ ID NO: 8233 hIgG2-Fc-(GS)10-3184/9342 (PA)8G linker
ERKSSVECPPCPAPPVAGPSVFLFPPKPKDTLMISRTPEVTCVVVDVSHEDPEVQFNWYVDGV
EVHNAKTKPREEQFNSTFRVVSVLTVVHQDWLNGKEYKCKVSNKGLPAPIEKTISKTKGQPR
EPQVYTLPPSREEMTKNQVSLTCLVKGFYPSDIAVEWESNGQPENNYKTTPPMLDSDGSFFLY
SKLTVDKSRWQQGNVFSCSVMHEALHNHYTQKSLSLSPGA-(GS)10-
GGRYVHDCFIAQVGDLCDLFAHGG-(PA)8G-VVCQDWEGVELCWQGG
SEQ ID NO: 8134 hIgG2-Fc-(GS)10-3178/9342 (PA)8G linker
ERKSSVECPPCPAPPVAGPSVFLFPPKPKDTLMISRTPEVTCVVVDVSHEDPEVQFNWYVDGV
EVHNAKTKPREEQFNSTFRVVSVLTVVHQDWLNGKEYKCKVSNKGLPAPIEKTISKTKGQPR
EPQVYTLPPSREEMTKNQVSLTCLVKGFYPSDIAVEWESNGQPENNYKTTPPMLDSDGSFFLY
SKLTVDKSRWQQGNVFSCSVMHEALHNHYTQKSLSLSPGA-(GS)10-
GGAYVHDCFIAQVGDLCDLFLHGG-(PA)8G-VVCQDWEGVELCWQGG
SEQ ID NO: 8135 hIgG2-Fc-1264
ERKSSVECPPCPAPPVAGPSVFLFPPKPKDTLMISRTPEVTCVVVDVSHEDPEVQFNWYVDGV
EVHNAKTKPREEQFNSTFRVVSVLTVVHQDWLNGKEYKCKVSNKGLPAPIEKTISKTKGQPR
EPQVYTLPPSREEMTKNQVSLTCLVKGFYPSDIAVEWESNGQPENNYKTTPPMLDSDGSFFLY
SKLTVDKSRWQQGNVFSCSVMHEALHNHYTQKSLSLSPGAPAPAPAPAPAPAPAPAPAPAGG
WYPCWMAQLGELCDLDGGGGSGGVVCQDWEGVELCWQGG
SEQ ID NO: 8136 hIgG2-Fc-5100
ERKSSVECPPCPAPPVAGPSVFLFPPKPKDTLMISRTPEVTCVVVDVSHEDPEVQFNWYVDGV
EVHNAKTKPREEQFNSTFRVVSVLTVVHQDWLNGKEYKCKVSNKGLPAPIEKTISKTKGQPR
EPQVYTLPPSREEMTKNQVSLTCLVKGFYPSDIAVEWESNGQPENNYKTTPPMLDSDGSFFLY
SKLTVDKSRWQQGNVFSCSVMHEALHNHYTQKSLSLSPGAGSGSGSGSGSGSGSGSGSGSGG
VHRIPWCTLDPGGLQCAWLRQMGGGGSGGVVCQDWEGVELCWQGG

[0843] An Fc fusion protein can comprise two Fc chains with at least one of the Fc chains comprising a fused IL-2Rβγc ligand and optionally an Fc-linker. The dimeric Fc-fusion proteins can be configured to have one IL-2Rβγc ligand, which can be referred to as monovalent IL-2Rβγc ligand-Fc-fusion, where an IL-2Rβγc ligand is covalently bound to one of the Fc chains and the other Fc chain is not bound to an IL-2Rβγc ligand. In a bivalent IL-2Rβγc ligand Fc-fusion an IL-2Rβγc ligand is fused to each Fc chain.

[0844] In addition to homodimeric bivalent IL-2Rβγc ligand Fc fusion proteins, in a monovalent IL-2Rβγc ligand Fc-fusion protein, one Fc chain can be empty and heterodimerization variants can be used to bring the two Fc chains together. These embodiments rely on the use of two different variant Fc sequences, that can self-assemble to form heterodimeric Fc chains and heterodimeric Fe fusion proteins. There are a number of mechanisms that can be used to generate the heterodimers. In addition, these mechanisms can be combined to ensure high heterodimerization. Heterodimerization variants can include steric variants such as knobs and holes or skew variants, charge pairs variants, and pH variants.

[0845] IL-2Rβγc ligand constructs provided by the present disclosure include constructs in which one or more IL-2Rβ ligands are bound to a construct partner and independently one or more IL-2Rγc ligands are bound to the construct partner. For example, an IL-2Rβ ligand can be bound to the C-terminus of an Fc fragment or immunoglobulin and an IL-2Rγc ligand can be bound to the N-terminus of an Fc fragment or an immunoglobulin. As another example, an IL-2Rβ ligand can be bound to the C-terminus of one heavy chain of an Fc fragment or immunoglobulin and an IL-2Rγc ligand can be bound to the other heavy chain of the Fc fragment or immunoglobulin.

[0846] A construct comprising one or more IL-2Rβ ligands and/or one or more IL-2Rγc ligands can comprise one or more IL-2Rβγc ligands bound to the construct partner. FIGS. 22 and 23 show examples of Fc fragments and immunoglobulins, respectively, in which ligands are bound to the C-terminus and/or to the N-terminus of the construct partner. Each of the ligands can independently be selected from an IL-2Rβγc ligand, an IL-2Rβ ligand, or an IL-2Rγc ligand.

[0847] In constructs comprising a protein or synthetic polymer, one or more IL-2Rβ ligands, one or more IL-2Rγc ligands, and/or one or more IL-2Rβγc ligands can be bound to the construct partner. For example, the ligands can be bound to the C-terminus and N-terminus of the protein or to the terminal groups of the polymer, and/or to functionalized side chains.

[0848] Each of the one or more IL-2Rβ ligands and one or more IL-2Rγc ligands can independently be bound to a construct partner through a construct linker. The construct linker can be, for example, any of the rigid or flexible linkers disclosed herein, and can be selected to facilitate a desired interaction with IL-2R.

[0849] IL-2Rβγc ligand constructs provided by the present disclosure can comprise a construct linker covalently binding an IL-2Rβγc ligand or a tandem IL-2Rβγc ligand to a construct partner including, for example, any of the peptides, polymers, Fc-fragments, immunoglobulin fragments, and antibodies disclosed herein.

[0850] A construct linker can be configured to facilitate binding of an IL-2Rβγc ligand to a binding site on IL-2R. A construct linker can be configured to facilitate activation of IL-2R by an IL-2Rβγc ligand.

[0851] A construct linker can be a peptidyl construct linker. A peptidyl construct linker can comprise, for example, from 2 to 30 amino acids, from 2 to 25 amino acids, from 2 to 20 amino acids, from 2 to 15 amino acids or from 2 to 10 amino acids. A peptidyl construct linker can comprise, for example, less than 30 amino acids, less than 25 amino acids, less than 20 amino acids, less than 15 amino acids, less than 10 amino acids, or less than 5 amino acids. A peptidyl construct linker can comprise, for example, more than 2 amino acids, more than 4 amino acids, more than 8 amino acids, more than 12 amino acids, or more than 16 amino acids.

[0852] A peptidyl construct linker can have a length, for example, from 5 Å to 500 Å, such as from 10 Å to 400 Å, from 50 Å to 300 Å, or from 100 Å to 200 Å. A peptidyl construct linker can have a length, for example, greater than 5 Å, greater than 10 Å, greater than 50 Å, greater than 100 Å, greater than 200 Å, greater than 300 Å, or greater than 400 Å.

[0853] A construct linker can be a chemical construct linker. A chemical construct linker can have a length, for example, from 5 Å to 500 Å, such as from 10 Å to 400 Å, from 5 Å to 300 Å, or from 100 Å to 200 Å. A chemical linker can have a length, for example, greater than 5 Å, greater than 10 Å, greater than 50 Å, greater than 100 Å, greater than 200 Å, greater than 300 Å, or greater than 400 Å.

[0854] A chemical construct linker can comprise a backbone comprising, for example, from 3 to 100 bonds, from 5 to 90 bonds, from 10 to 80 bonds, or from 20 to 60 bonds. A chemical construct linker can comprise a backbone comprising, for example, greater than 3 bonds, greater than 5 bonds, greater than 10 bonds greater than 20 bonds greater than 50 bonds, or greater than 100 bonds.

[0855] Examples of suitable peptidyl construct linkers include peptides having any one of SEQ ID NOS: 9380-9401 and 9419-9425, where n can be an integer from 1 to 30, such as from 2 to 25, from 2 to 20, from 2 to 16, from 3 to 12, from 4 to 10, or from 6 to 8.

[0856] An IL-2Rβγc ligand can be bound to a construct linker through the N-terminus or through the C-terminus of the IL-2Rβγc ligand.

[0857] Examples of IL-2Rβγc ligand constructs having different linker configurations are shown in FIGS. 19A-19C.

[0858] In IL-2Rβγc ligand constructs having more than one IL-2Rβγc ligand, each of the IL-2Rβγc ligands can be bound to the construct partner through an independent construct. Each of the construct linkers can be the same or at least one of the construct linkers can be different. Each of the more than one IL-2Rβγc ligands can be bound to a respective construct partner through the N-terminus or through the C-terminus of the IL-2Rβγc ligand.

[0859] A construct linker can comprise a cleavable construct linker. A cleavable construct linker can be cleaved in vivo, for example, in the presence of a certain pH, enzymatically, or by application of energy such as by application of electromagnetic radiation including ultraviolet light or infrared irradiation.

[0860] An IL-2Rβγc ligand construct can comprise one or more IL-2Rβγc ligands bound to a checkpoint inhibitor, such as a PD-1 checkpoint inhibitor including, for example, an antibody checkpoint inhibitor such as pembrolizumab and cemiplimab.

[0861] In an IL-2Rβγc checkpoint inhibitor construct, the one or more IL-2Rβγc ligands can have the amino acid sequence of any one of SEQ ID NOS: 1263-1270, or an amino acid sequence having greater than 60%, greater than 70%, greater than 80%, greater than 85%, greater than 90%, or greater than 95% amino acid sequence similarity to any one of SEQ ID NOS: 1263-1270.

[0862] In IL-2Rβγc checkpoint inhibitor antibody constructs the one or more IL-2Rβγc ligands can have an amino acid sequence of any one of SEQ ID NOS: 1263-1270 or an IL-2Rβγc ligand having an amino acid sequence similarity to any one of SEQ ID NOS: 1263-1270 bound to the C-terminus of one heavy chain, the C-terminus of both heavy chains, the N-terminus of one heavy chain, the N-terminus of both heavy chains, the N-terminus of on light chain, the N-terminus of both light chains, or a combination of any of the foregoing. Each of the one or more IL-2Rβγc ligands can independently be bound to the checkpoint inhibitor antibody through a construct linker, which can comprise, for example, from 1 to 50 amino acids.

[0863] The N-terminus of the IL-2Rβγc ligand can be bound to the checkpoint inhibitor antibody through the construct linker.

[0864] An IL-2Rβγc ligand construct can be a pembrolizumab/IL-2Rβγc fusion protein where the light chain has the amino acid sequence of SEQ ID NO: 1218 (FP7), or an amino acid sequence having greater than 60%, greater than 70%, greater than 80%, greater than 85%, greater than 90%, or greater than 95% amino acid sequence similarity to SEQ ID NO: 1218 (FP7); and the heavy chain has the amino acid sequence of SEQ ID NO: 1219 (FP8)), or an amino acid sequence having greater than 60%, greater than 70%, greater than 80%, greater than 85%, greater than 90%, or greater than 95% amino acid sequence similarity to SEQ ID NO: 1219 (FP8).

[0865] A pembrolizumab/IL-2Rβγc fusion protein can comprise two pembrolizumab heavy chains and two pembrolizumab light chains, wherein an IL-2Rβγc ligand having an amino acid sequence of any one of SEQ ID NOS: 1263-1270 or an amino acid sequence having greater than 60%, greater than 70%, greater than 80%, greater than 85%, greater than 90%, or greater than 95% amino acid sequence similarity to SEQ ID NOS: 1263-1270 is bound to the C-terminus of one heavy chain, the C-terminus of both heavy chains, the N-terminus of one heavy chain, the N-terminus of both heavy chains, the N-terminus of one light chain, the N-terminus of both light chains, or a combination of any of the foregoing. Each of the one or more IL-2Rβγc ligands can independently be bound to the pembrolizumab antibody through a construct linker, which can comprise, for example, from 1 to 50 amino acids.

[0866] The N-terminus of the IL-2Rβγc ligand can be bound to pembrolizumab through the construct linker.

[0867] An IL-2Rβγc ligand construct can be a cemiplimab/IL-2Rβγc fusion protein where the light chain has the amino acid sequence of SEQ ID NO: 1220 (FP9), or an amino acid sequence having greater than 60%, greater than 70%, greater than 80%, greater than 85%, greater than 90%, or greater than 95% amino acid sequence similarity to SEQ ID NO: 1220 (FP9); and the heavy chain has the amino acid sequence of SEQ ID NO: 1221 (FP10)), or an amino acid sequence having greater than 60%, greater than 70%, greater than 80%, greater than 85%, greater than 90%, or greater than 95% amino acid sequence similarity to SEQ ID NO: 1221 (FP10).

[0868] A cemiplimab/IL-2Rβγc fusion protein can comprise two cemiplimab heavy chains and two cemiplimab light chains, wherein an IL-2Rβγc ligand having an amino acid sequence of any one of SEQ ID NOS: 1263-1270, or an amino acid sequence having greater than 60%, greater than 70%, greater than 80%, greater than 85%, greater than 90%, or greater than 95% amino acid sequence similarity to any one of SEQ ID NOS: 1263-1270 is bound to the C-terminus of one heavy chain, the C-terminus of both heavy chains, the N-terminus of one heavy chain, the N-terminus of both heavy chains, the N-terminus of one light chain, the N-terminus of both light chains, or a combination of any of the foregoing. Each of the one or more IL-2Rβγc ligands can independently be bound to the cemiplimab antibody through a construct linker, which can comprise, for example, from 1 to 50 amino acids.

[0869] The N-terminus of the IL-2Rβγc ligand can be bound to cemiplimab through the construct linker.

[0870] An IL-2Rβγc ligand construct can be a hIgG2/IL-2Rβγc fusion protein where hIgG2 has the amino acid sequence of SEQ ID NO: 1268 or an amino acid sequence greater than 60%, greater than 70%, greater than 80%, greater than 85%, greater than 90%, or greater than 95% amino acid sequence similarity to SEQ ID NO: 1268 and one or more IL-2Rβγc ligands having an amino acid sequence of any one of SEQ ID NOS: 1263-1270 or an amino acid sequence greater than 60%, greater than 70%, greater than 80%, greater than 85%, greater than 90%, or greater than 95% amino acid sequence similarity to any one of SEQ ID NOS: 1263-1270 is bound to one C-terminus of hIgG2, both C-termini of hIgG2, one N-terminus of hIgG2, both N-termini of hIgG2, or a combination of any of the foregoing. Each of the one or more IL-2Rβγc ligands can independently be bound to IgG2 through a construct linker, which can comprise, for example, from 1 to 50 amino acids. The IgG fusion partner can be hIgG1 or hIgG4 and the one or more IL-2Rβγc ligands can be bound to the hIgG1 or hIgG4 fusion partner as described for hIgG2.

[0871] The N-terminus of the IL-2Rβγc ligand can be bound to hIgG2 through the construct linker.

[0872] An IL-2Rβγc ligand/immunoglobulin fusion protein can comprise one or more IL-2Rβγc ligands bound to an immunoglobulin such as hIgG1, hIgG2, hIgG3, or hIgG4. Examples of IL-2Rβγc ligand/immunoglobulin constructs are shown in FIGS. 23A-23F, where the immunoglobulin comprises heavy chains 231 and light chains 232, and IL-2Rβγc ligands 233 bound to either the C-terminus and/or N-terminus of the heavy chains 231 and/or light chains 232.

[0873] An IL-2Rβγc ligand construct can comprise one or more IL-2Rβγc ligands bound to an immunoglobulin Fc-fragment. The one or more IL-2Rβγc ligands can have the amino acid sequence of any one of SEQ ID NOS: 1263-1270, or an amino acid sequence having greater than 60%, greater than 70%, greater than 80%, greater than 85%, greater than 90%, or greater than 95% amino acid sequence similarity to any one of SEQ ID NOS: 1263-1270. The IL-2Rβγc ligands can be bound to the C-terminus and/or to the N-terminus and to one or both of the Fc-chains of the Fc fragment. As shown in FIGS. 22A-22F, an IL-2Rβγc ligand 223 can be bound to one or both Fc-chains 221 and 222.

[0874] The Fc-fragment can be derived, for example, from any suitable immunoglobulin such as hIgG1, hIgG2, hIgG3, or hIgG4.

[0875] The N-terminus of the IL-2Rβγc ligand can be bound to an Fc-fragment through the construct linker. The construct linker can be selected, for example, from a construct linker having an amino acid sequence of any one of SEQ ID NOS: 9380-9407. The construct linker can be selected, for example, from a peptidyl construct linker having an amino acid sequence of any one of SEQ ID NOS: 9419-9428. A construct linker can comprise, for example, from 1 to 100 amino acids such as from 1 to 50, from 1 to 20, from 1 to 10 or from 1 to 5 amino acids where each amino acid is independently selected from S and G. A construct linker can comprise, for example, from 1 to 100 amino acids such as from 1 to 50, from 1 to 20, from 1 to 10 or from 1 to 5 amino acids where each amino acid is independently selected from proline, alanine, lysine, and glutamic acid. A construct linker can comprise, for example, (PA)ₙ (SEQ ID NO: 9421) where n can be, for example, an integer from 1 to 20. Each construct linker can be selected such that an IL-2Rβγc ligand to which it is bound is an IL-2R agonist. The linker can be, for example, a peptidyl linker selected from any one of SEQ ID NOS: 9384, 9389, and 9394-9398.

[0876] Functionally, an IL-2Rβγc binding compound provided by the present disclosure can be, for example, a full IL-2R agonist, a partial IL-2R agonist a diagnostic reagent, an imaging reagent, a targeting compound, a cytotoxic compound, and/or a compound exhibiting dual pharmacology.

[0877] An IL-2Rβγc binding compound provided by the present disclosure can be attached to one or more moieties that impart a property to the compound that enhances therapeutic efficacy. Examples of properties include potency, aqueous solubility, polarity, lipophilicity, pharmacokinetics, targeting, bioavailability, pH-dependent binding, bioactivity, pharmacodynamics, cellular activity, metabolism, efficacy, reversible incapacitation (caging), selectivity, or a combination of any of the foregoing.

[0878] A cell-specific targeting moiety can comprise a moiety that has an affinity for a component on the surface of a cell such as a receptor, a protein, or an epitope. A targeting moiety can comprise, for example, a ligand or an antibody having an affinity to a cell surface component.

[0879] A targeting moiety can direct and concentrate compounds comprising an IL-2Rβγc binding compound at the cells, population of cells, or tissue targeted by the targeting moiety.

[0880] A targeting moiety can enhance the potency of IL-2R agonism or IL-2R antagonism for the cells or population of cells being targeted.

[0881] A targeting moiety can provide a differential response to IL-2R agonism or to IL-2R antagonism between the cells being targeted and the cells not being targeted by the targeting moiety.

[0882] A targeting moiety can provide a differential response to IL-2R agonism or IL-2R antagonism between cells having a high expression level of the targeted component and cells having a lower expression level of the targeted component.

[0883] An IL-2Rβγc binding compound can further comprise a bioactive moiety or a bioactive molecule. An IL-2Rβγc compound can be used to deliver the bioactive moiety or bioactive molecule to cells, to a population of cells, or to a tissue expressing the IL-2Rβ subunit and the Rγc subunit.

[0884] The bioactive moiety or molecule can be non-cleavable and capable of exerting a biological activity when bound to an IL-2Rβγc binding compound.

[0885] The bioactive moiety or molecule can be cleavable. The moiety can be cleavable by any suitable mechanism such as by pH, enzymatic, thermal, and/or electromagnetic mechanisms. Electromagnetic mechanisms include, for example, exposing the compounds to infrared, visible, or ultraviolet radiation, where the bioactive moiety is attached to the compounds comprising a ligand through a photolabile moiety capable of being cleaved by the radiation.

[0886] The bioactive molecule can be non-cleavable but otherwise activatable, such as for example, activatable by exposure to electromagnetic radiation.

[0887] Ligands can be selected to have enhanced binding to the IL-2Rβ and/or Rγc subunit at a certain pH. For example, a pH-selective ligand can have a greater binding affinity to the IL-2Rβ and/or Rγc subunit at low pH commensurate with that of a solid tumor microenvironment. IL-2Rβγc binding compounds comprising low-pH selective ligands can be used to preferentially activate cells in low pH environments expressing the IL-2Rβ subunit and the Rγc subunit compared to cells in normal pH environments associated with healthy tissue.

[0888] Thus, A IL-2Rβγc binding compounds comprising selective IL-2Rβ and/or Rγc ligands such as pH-selective IL-2Rβ and/or Rγc ligands can be used with other pH-selective bioactive moieties and molecules.

[0889] A bioactive moiety or bioactive molecule can itself be selective for a particular cell population. For example, a bioactive moiety or bioactive molecule can exhibit a greater or lesser binding affinity, potency, and/or activity at the cell being targeted by a selective ligand. For example, the bioactive moiety or molecule can exhibit greater bioactivity in a low pH tumor microenvironment when targeted by a pH-selective ligand. In this example, the bioactive moiety is directed to cells located in the low-pH tumor microenvironment that express the IL-2Rβ subunit by the pH-selective ligand. Thus, the activity of the pH-selective bioactive moiety is enhanced in the low-pH tumor microenvironment.

[0890] An IL-2Rβγc binding compound can further comprise a cytotoxic moiety or cytotoxic molecule. Such compounds can be used to deliver a cytotoxic moiety or compound to a cell expressing the IL-2Rβγc subunit. The cytotoxic moiety or molecule can exert cytotoxicity when bound to the compound or can be cleavable and the moiety or molecule can be cytotoxic when released from the compound; or the cytotoxic moiety can be activated by electromagnetic radiation.

[0891] The cytotoxic moiety or molecule can be used to deplete cells expressing the IL-2Rβ subunit being targeted.

[0892] Cytotoxic an IL-2Rβγc binding compounds can have more than one I1-2Rβγc ligands and thereby can exhibit a higher affinity and/or selectivity to cells, populations of cells, and tissue that highly expresses the IL-2Rβ subunits compared to cells having a lower expression level of the IL-2Rβ subunit.

[0893] Cytotoxic IL-2Rβγc binding compounds can further include a cell surface targeting component. Such cytotoxic compounds can exhibit enhanced efficacy to cells, populations of cells, and tissue expressing the IL-2Rβ subunit and the surface target component.

[0894] Examples of suitable cytotoxic molecules include anti-microtubule agents, alkylating agents, and DNA minor groove binding agents.

[0895] An IL-2Rβγc binding compound can comprise a moiety having an additional pharmacological activity other than that mediated by activation of the IL-2 receptor. The pharmacological activity can be an activity that has a therapeutic efficacy that is synergistic with that of IL-2R agonist or antagonist activity or the pharmacological activity can be an activity that has a therapeutic efficacy that is not synergistic with that of the IL-2R agonist or antagonist activity. Examples of suitable pharmacological moieties include antibodies and antibody fragments that are inhibitors of checkpoint molecules, pro-apoptotic and anti-apoptotic molecules, cytotoxic molecules, agonists of chemokine, antagonists of chemokine, cytokine, growth factor and other cell surface receptors, and ligands and inhibitors of cell surface adhesion molecules such as integrins.

[0896] One or more ligands provided by the present disclosure can be bound to a molecule comprising a targeting moiety that confers the ability to target the one or more IL-2Rβγc ligands to specific tissues or cells in a patient. A targeting moiety can have an affinity for a cell-surface protein or receptor expressed on the surface of a target tissue or target cell, and thereby can direct a dual ligand to the target tissue or cell. Examples of targeting moieties include antigen binding moieties including antibodies and fragments thereof specific for cell surface proteins, ligands, biological receptors, and antigens.

[0897] An antibody can bind to an antigen expressed on the surface of the target cell type. The antibody may not have any useful or known useful pharmacologic function but serves to direct an IL-2Rβγc binding construct to preferentially target a cell type or tissue compared to cell types or tissues not expressing the targeted antigen or having an expression level of the targeted antigen less than that of the targeted cell type or tissue. An antibody can have a useful pharmacological function when bound to a cell surface antigen. These constructs are referred to as dual pharmacology IL-2Rβγc binding constructs.

[0898] An IL-2Rβγc binding compound can include, for example, a tumor-targeting moiety such as, for example, a tumor-specific antibody, a tumor-specific antibody fragment, a tumor-specific protein, a tumor-specific peptide, a non-peptidyl tumor cell ligand, or a combination of any of the foregoing.

[0899] An IL-2Rβγc binding compound can include an immune cell-targeting moiety such as, for example, an immune cell-specific antibody, an immune cell-specific antibody fragment, an immune cell-specific protein, an immune cell-specific peptide, a non-peptidyl immune cell-ligand, or a combination of any of the foregoing.

[0900] One or more IL-2Rβγc ligands can be bound to a molecule comprising a targeting moiety that confers the ability to target the one or more IL-2Rβγc ligands to specific tissues or cells in a patient. A targeting moiety can have an affinity for a cell-surface protein or receptor expressed on the surface of a target tissue or target cell, and thereby can direct an IL-2Rβγc ligand to the target tissue or cell. Examples of targeting moieties include antigen binding moieties including antibodies and fragments thereof specific for cell surface proteins, ligands, biological receptors, and antigens.

[0901] An antibody can bind to an antigen expressed on the surface of the target cell type. The antibody may not have any useful or known useful pharmacologic function but serves to direct an IL-2Rβγc ligand construct to preferentially target a cell type or tissue compared to cell types or tissues not expressing the targeted antigen or having an expression level of the targeted antigen less than that of the targeted cell type or tissue. An antibody can have a useful pharmacological function when bound to a cell surface antigen. These constructs are referred to as dual pharmacology IL-2Rβγc ligand constructs.

[0902] An IL-2Rβγc ligand fusion protein can comprise one or more antigen binding moieties. The two more antigen binding moieties can be directed to the same antigen or to different antigens.

[0903] A targeting moiety can be an antigen binding moiety and the IL-2Rβγc fusion protein can be an immunoconjugate. The immunoconjugate can comprise one or more antigen binding moieties capable of binding to an antigen expressed on a cell surface, on the surface of virus-infected cells on the surfaces of diseased cells in the blood serum, and/or in the extracellular matrix.

[0904] An antigen binding moiety can comprise an antibody or an antibody fragment. The antigen binding moiety can be an immunoglobulin molecule such as, for example, an IgG class immunoglobulin, including an IgG1, IgG2, or IgG4 isotype. An IL-2Rβγc ligand can be bound to one or both of the heavy chains such as at the C-terminus of the CH3 domain. An antigen binding moiety can be a Fab molecule, an scFv molecule, or a peptide.

[0905] An antigen binding moiety can be directed to any specific antigen such as, for example, an antigen expressed on the surface of a tumor cell or in a tumor cell environment, an antigen expressed on an immune cell, an antigen expressed on the surface of a cell expressing predominantly the IL-2Rβ and IL-2Rγc subunits of IL-2R such as CD4+ T-cells, CD8+ T-cells, Tregs, or NK cells.

[0906] Examples of suitable antigen targets expressed on tumor cells include fibroblast activation protein (FAP), the A1 domain of tenascin-C (TNC A1), the A2 domain of tenascin-C (TNC A2), the extradomain B of fibronectin (EDB), carcinoembryonic antigen (CEA), and the melanoma-associated chondroitin sulfate proteoglycan (MCSP).

[0907] Other examples of suitable tumor antigens that can be used for targeting include MAGE, MART-1/Melan-A, gplOO, Dipeptidyl peptidase IV (DPPIV), adenosine deaminase-binding protein (ADAbp), cyclophilin b, Colorectal associated antigen (CRC)-0017-A/GA733, Carcinoembryonic Antigen (CEA) and its immunogenic epitopes CAP-1 and CAP-2, etv6, amll, Prostate Specific Antigen (PSA) and its immunogenic epitopes PSA-1, PSA-2, and PSA-3, prostate-specific membrane antigen (PSMA), T-cell receptor/CD3-zeta chain, MAGE-family of tumor antigens (e.g., MAGE-A1, MAGE-A2, MAGE-A3, MAGE-A4, MAGE-AS, MAGE-A6, MAGE-A7, MAGE-AS, MAGE-A9, MAGE-AlO, MAGE-All, MAGE-A12, MAGE-Xp2 (MAGE-B2), MAGE-Xp3 (MAGE-B3), MAGE-Xp4 (MAGE-B4), MAGE-C1, MAGE-C2, MAGE-C3, MAGE-C4, MAGE-CS), GAGE-family of tumor antigens such as GAGE-I, GAGE-2, GAGE-3, GAGE-4, GAGE-5, GAGE-6, GAGE-7, GAGE-8, GAGE-9, BAGE, RAGE, LAGE-I, NAG, GnT-V, MUM-1, CDK4, tyrosinase, p53, MUC family, HER2/neu, p21ras, RCAS1, a-fetoprotein, E-cadherin, a-catenin, -catenin and y-catenin, p120ctn, gplOO Pmel117, PRAME, NY-ES0-1, cdc27, adenomatous polyposis coli protein (APC), fodrin, Connexin 37, Ig-idiotype, p15, gp75, GM2 and GD2 gangliosides, viral products such as human papilloma virus proteins, Smad family of tumor antigens, lmp-1, PIA, EBY-encoded nuclear antigen (EBNA)-1, brain glycogen phosphorylase, SSX-1, SSX-2 (HOM-MEL-40), SSX-1, SSX-4, SSX-5, SCP-1 and CT-7, and c-erbB-2.

[0908] Examples of viral antigens include influenza virus hemagglutinin, Epstein-Barr virus LMP-1, hepatitis C virus E2 glycoprotein, HIV gp160, and HIV gp120.

[0909] Examples of ECM antigens include syndecan, heparanase, integrins, osteopontin, link, cadherins, laminin, laminin type EGF, lectin, fibronectin, notch, tenascin, and matrixin.

[0910] Targeted IL-2Rβγc ligand fusion proteins can be configured to bind, for example, to a cell surface antigen selected from FAP, Her2, EGFR, IGF-1R, CD2 (T-cell surface antigen), CD3 (heteromultimer associated with the TCR), CD22 (B-cell receptor), CD23 (low affinity IgE receptor), CD30 (cytokine receptor), CD33 (myeloid cell surface antigen), CD40 (tumor necrosis factor receptor), IL-6R (IL6 receptor), CD20, MCSP, and PDGFR (platelet-derived growth factor receptor).

[0911] A targeted IL-2Rβγc ligand construct can comprise an antigen binding moiety capable of binding to an antigen or to a receptor expressed on the surface of a cell by a cell that also expresses IL-2R. Examples of cells expressing IL-2R include, for example, Treg cells, NK cells, CD8+ T-cells, CD4+ T-cells and activated T-cells.

[0912] A targeted IL-2Rβγc ligand construct can comprise an antigen binding moiety capable of binding to an antigen or a receptor expressed by a cell that expresses the IL-2Rβ and IL-2Rγc subunits of IL-2R. Examples of cells expressing the IL-2Rβ and IL-2Rγc subunits of IL-2R include, for example, NK cells, CD4+ T-cells, CD8+ T-cells cells, and activated T-cells.

[0913] Examples of antigens expressed on the surface of naïve CD4+ T-cells include CD4+, CD45RA+, CD45RO−, CCR7+, and CD25.

[0914] Examples of antigens expressed on the surface of CD8+ T-cells include NKG2D, CD8+, CD45RA+, CD45O+, CCR7+, and CD28+.

[0915] Examples of antigens expressed on the surface of CD4+ T -cells include Th1 cell markers such as CD4+, CXCR3+, CCR5+, and IL12Rβ2+; Th2 cell markers such as CD4+, CCR4+, and IL12Rβ2+; Th9 cell markers such as CD4+, CCR3+, and CCR5+; Th17 cell markers such as CD4+, CCR6+, CCR4+, and NK1.1+; Th22 cell markers such as CD4+, CCR10+, CCR4+, and CCR6+; Treg cell markers such as CD4+, CD127+, CD24+, and CTLA-4+; and Tfh cell markers such as CD4+, CXCR5+, CD40L+, and ICOS+.

[0916] Examples of antigens expressed on the surface of cytotoxic CD8+ T cell include CD8+ and CCR7−.

[0917] Examples of memory T-cell antigens include CCR5, CCR7, CD11a, CD27, CD28, CD45RA, CD45RO, CD57, and/CD62.

[0918] Examples of naive T-cell antigens include CD45RA, CCR7, CD62L, CD127, and CD132.

[0919] Examples of antigens expressed on the surface of NK cells include TRAIL, CD16, NKp30ab, NKG2C, NKG2D, 2B4, DNAM-1, NKH2A, KIRs, CD137, OX40, CD27, CD16, CD56, CD57, and CD 27.

[0920] A targeted IL-2Rβγc ligand construct can comprise an antigen binding moiety capable of binding to an antigen or receptor expressed on the surface of cells having a role in regulating the immune response.

[0921] Examples of antigens expressed by cells associated with regulating the immune response include PD-1, CTLA-4, CD20, and CD30.

[0922] A targeted IL-2Rβγc ligand construct can comprise an antigen binding moiety capable of binding to an antigen or receptor expressed on the surface of Treg cells such as CD25. For example, a Treg cell-targeted construct can comprise an IL-2Rβγc ligand/daclizumab antibody fusion.

[0923] A dual pharmacology IL-2Rβγc ligand construct provided by the present disclosure can comprise an IL-2Rβγc ligand provided by the present disclosure and a pharmacological moiety. A pharmacological moiety can exert a therapeutic effect on cells expressing IL-2R or on cells other than those expressing IL-2R. One or more IL-2Rβγc ligands can be linked to a biological agent including therapeutic compounds such as, for example, antineoplastic agents, anti-microbial agents, hormones, immunomodulators, and anti-inflammatory agents.

[0924] A dual pharmacology IL-2Rβγc ligand construct can comprise, for example, a protein such as an antibody. An antibody can be an IgA isotype, IgD isotype, IgE isotype, IgG isotype, or IgM isotype. A dual pharmacology IL-2Rβγc ligand construct can comprise an IL-2Rβγc ligand coupled to a pharmacologically active antibody through a linker. The linker can be a naturally occurring molecule or a synthetic molecule.

[0925] A dual pharmacology IL-2Rβγc ligand construct can comprise an antibody having an antigen binding moiety and one or more IL-2Rβγc ligands bound to the Fc chain through an Fc linker.

[0926] An antibody can comprise an antibody directed to a cell-specific antigen. Examples of antibodies directed to cell-specific antigens include alemtuzumab (CD52 antigen), trastuzumab (Her2 protein), ibritumomab tiuxetan (CD20 antigen), brentuximab vedotin (CD30 antigen), ado-trastuzumab emtansine (Her2 protein), blinatumomab (CD19 protein and CD3 protein).

[0927] A dual pharmacology IL-2Rβγc ligand construct can comprise a moiety known to be useful in treating cancer. Examples of monoclonal antibodies known to be useful in treating cancer include alemtuzmab, atezolizumab, avelumab, bevacizumab, brentuximab, cemiplimab cetuximab, trastuzumab, denosumab, rituximab, ipilimumab, nivolumab, obinutuzumab, ofatumumab, panitumumab, pembrolizumab, pertuzumab, rituximab, and trastuzumab.

[0928] A dual pharmacology IL-2Rβγc ligand construct can comprise a moiety known to be a checkpoint inhibitor such as CTLA-4 inhibitors, PD-1 inhibitors, PD-L1, and PD-L2 inhibitors.

[0929] Examples of suitable PD-1 inhibitors include nivolumab, cemiplimab, and pembrolizumab; examples of CTLA-4 inhibitors include ipilimumab; and examples of PD-LI inhibitors include atezolizumab and durvalumab.

[0930] Examples of monoclonal antibodies useful in treating autoimmune and inflammatory diseases include abciximab, adalimumab, alefacept, alemtuzumab, basiliximab, belimumab, bezlotuxumab, canakinumab, certolizumab, daclizumab, denosumab, efalizumab, golimumab, inflectra, ipilimumab, ixekizumab, natlizumab, nivolumab, olaratumab, amalizumab, palivizumab, panitumumab, pembrolizumab, rituximab, tocilizumab, trastuzumab, secukinumab, and ustekinumab.

[0931] A dual pharmacology IL-2Rβγc ligand antibody construct can comprise an antibody to a checkpoint inhibitor. Antibodies to checkpoint inhibitors include CTLA-4 blockade blocking antibodies, PD-1 inhibitors such as nivolumab, pembrolizumab, and spartalzumab; PD-L1 inhibitors such as alezolizumab; and other antibodies targeting intrinsic checkpoint blockades such as CISH.

[0932] Suitable FDA-approved antibody checkpoint inhibitors include ipilimmab (CTLA-4), nivolivab (PD-1), pembrolizumab (PD-1), ale zolzumab (PD-1), avelumab (PD-1), durvalumab (PD-1), and cemiplimab (PD-1).

[0933] A dual pharmacology IL-2Rβγc ligand construct can comprise a cytokine fusion. An IL-2Rβγc ligand cytokine construct can comprise one or more IL-2Rβγc ligands and one or more cytokines bound to a naturally occurring or synthetic molecule. For examples, one or more IL-2Rβγc ligands and one or more cytokines can be bound to a polypeptide or to a protein such as an IgG or an Fc-fragment. A cytokine can be selected from, for example, an interleukin, a chemokine, a colony-stimulating factor, an interferon, a transforming growth factor, and a tumor necrosis factor.

[0934] An IL-2Rβγc binding construct provided by the present disclosure can comprise a virology construct. An IL-2Rβγc binding virology construct can comprise a ligand provided by the present disclosure to protein expressed on the surface of a virus, an antigen expressed on the surface of a cell targeted by the virus, a cell surface antigen targeted by the virus, or a virus-like particle, or a vaccine.

[0935] Certain IL-2Rβγc ligands and IL-2Rβγc ligand constructs provided by the present disclosure can be synthesized using recombinant DNA technology.

[0936] Certain IL-2Rβγc ligands and IL-2Rβγc ligand constructs provided by the present disclosure can be synthesized using synthetic organic chemistry methods.

[0937] IL-2Rβγc ligands and IL-2Rβγc ligand constructs provided by the present disclosure are agonists of IL-2R.

[0938] An IL-2Rβγc ligand and IL-2Rβγc ligand construct can bind to the IL-2Rβ subunit and/or to the IL-2Rγc subunit of IL-2R and can activate IL-2R. The binding affinity (IC₅₀) of an IL-2Rβγc ligand or IL-2Rβγc ligand construct to the IL-2Rβ subunit and/or to the IL-2Rγc subunit can independently be, for example, less than 100 μM, less than 10 μM, less than 1 μM, less than 100 nM, less than 10 nM, or less than 1 nM.

[0939] The binding affinity (IC₅₀) of an IL-2Rβγc ligand or IL-2Rβγc ligand construct to the IL-2Rβ subunit and/or to the IL-2Rγc subunit can be, for example, less than 100 μM, less than 10 μM, less than 1 μM, less than 100 nM, less than 10 nM, or less than 1 nM. An IL-2Rβγc ligand or IL-2Rβγc ligand construct can bind to the IL-2Rβ subunit and/or to the IL-2Rγc subunit either competitively or non-competitively with IL-2.

[0940] An IL-2Rβγc ligand or IL-2Rβγc ligand construct can be configured to more potently activate cells expressing the IL-2Rβ subunit and the IL-2Rγc subunit, thereby facilitating the ability to differentially activate IL-2R expressed on the surface of different cell types by controlling a dose of an IL-2Rβγc ligand agonist or IL-2Rβγc ligand construct agonist. For example, when incubated with an IL-2Rβγc ligand or an IL-2Rβγc ligand construct, primary human peripheral blood mononuclear cells (PBMC) expressing the IL-2Rβγc subunit phosphorylate signal transducer and activator of transcription 5 (STAT5).

[0941] The EC₅₀ for STAT5 phosphorylation in TF-1β or NK-92 cells induced by an IL-2Rβγc ligand or an IL-2Rβγc ligand construct can be, for example, less than 100 μM, less than 10 μM, less than 1 μM, less than 100 nM, less than 10 nM, or less than 1 nM.

[0942] The EC₅₀ for STAT5 phosphorylation in TF-1β or NK-92 cells induced by an IL-2Rβγc ligand or an IL-2Rβγc ligand construct can be, for example, within a range from 1 pM to 100 μm, from 10 pM to 10 μm, or from 100 pM to 1 μm.

[0943] IL-2Rβγc ligands and IL-2Rβγc ligand constructs provided by the present disclosure can active the STAT5 phosphorylation pathway, the AKT phosphorylation pathway, and the ERK1/2 phosphorylation pathway in NK-92 cells.

[0944] An IL-2Rβγc ligand or IL-2Rβγc ligand construct can partially activate IL-2R. Partial activation refers to a level of activation, that is, for example, less than 75% of maximum activation, less than 50%, less than 25%, less than 10%, or less than 1% of the maximum activation. Maximum activation (Eₘₐₓ) of IL-2R refers to the amplitude of cellular signal (activation) achievable at high agonist concentration such as a high concentration of IL-2. Partial IL-2R agonists can be effective in modulating the levels of response of IL-2R to activation of the IL-2Rβ and IL-2Rγc subunits among different cell types expressing IL-2R. For example, different cell types are known to vary in expression levels of each of the IL-2R subunits, IL-2Rα, IL-2Rβ, and IL-2Rγc, and to exhibit different sensitivities to IL-2R agonists.

[0945] An IL-2Rβγc ligand or IL-2Rβγc ligand construct can comprise modified IL-2Rβ ligands and/or IL-2Rγc ligands. Modified IL-2Rβ and IL-2Rγc ligands can be selected or designed to bind and activate IL-2R, but with low or modest affinity and potency to IL-2R. Such IL-2Rβγc ligands and IL-2Rβγc ligand constructs can have greater differential sensitivity for IL-2R activation between cells that highly express IL-2Rα and cells having a low level of IL-2Rα expression; for example, between Tregs that have a high expression of IL-2Rα and Teff cells that have a low expression level of IL-2Rα.

[0946] IL-2Rβγc ligands and IL-2Rβγc ligand constructs provided by the present disclosure can act as full IL-2R agonists, partial IL-2R agonists, biased IL-2R agonists, or pH-biased IL-2R agonists.

[0947] As shown in Example 8, in NK-92 cells, the IL-2Rβγc ligand (BGL21) acts as a full agonist comparable to IL-2 with respect to STAT5 phosphorylation, AKT phosphorylation and ERK1/2 phosphorylation in NK-92 cells.

[0948] As shown in Examples 3-6 and corresponding FIGS. 2-5B, other IL-2Rβγc ligands provided by the present disclosure exhibit a STAT5 phosphorylation activity in TF-1β cells that is less than that of IL-2Rβγc ligand (BGL21) and can be considered partial agonists with respect to the STAT5 phosphorylation in TF-1β cells.

[0949] As shown in Example 9, with respect to STAT5 phosphorylation in resting CD8 T-cells, resting Treg cells and resting CD4 T-cells, IL-2Rβγc ligand (BGL21) exhibits non-selective agonist activity of around 1E-9 (EC50) across the different cell types. In contrast, the EC₅₀ for IL-2 varies by about two (2) orders of magnitude and exhibits a high selectivity for STAT5 phosphorylation in resting Treg cells.

[0950] Similar effects are observed for IL-2Rβγc ligand constructs where agonist activity as determined by STAT5 phosphorylation in TF-1β cells was modified depending on the IL-2Rβγc ligand, the construct linker, the construct partner, and the binding location on the construct partner.

[0951] IL-2Rβγc ligands and IL-2Rβγc ligand constructs provided by the present disclosure can act as IL-2R antagonist. An IL-2Rβγc ligand antagonist and IL-2Rβγc ligand construct antagonist provided by the present disclosure can bind to IL-2R with an IC₅₀, for example, of less than 100 μM, less than 10 μM, less than 1 μM, less than 0.1 μM, or less than 0.01 μM and exhibits no detectable functional activity as determined, for example, using any of the functional assays disclosed in the examples such as the STAT5 phosphorylation assay.

[0952] IL-2Rβγc binding compounds provided by the present disclosure can be useful when combined with certain vaccines, including cancer neo-antigen vaccines. Mutations in tumor DNA produces new protein sequences that are foreign to the body. Vaccines can be designed to specifically activate a patient's immune system with respect to tumor-specific neoantigens. When administered in combination with a neo-antigen vaccine, IL-2Rβγc binding compounds provided by the present disclosure can expand and proliferate neo-antigen-specific T-cells in the tumor microenvironment and thereby drive maximal expansion of vaccine-induced neoantigen-specific T-cells for the treatment of cancer.

[0953] For example, bempegaldesleukin (NKTR-214), reported to be a biased IL-2Rβγc agonist, was combined with neo-antigen vaccine VB10.NEO in a preclinical tumor model. Synergistic effects on neoantigen-specific T-cell responses were observed. The synergistic effect was also observed in both CD4 and CD8 T-cells with the most pronounced effects on CD8 T-cells. The neo-antigen vaccine VB10.NEO in combination with NKTR-214 and anti-PD-1 induced rapid and durable tumor regression of small tumors and long-lasting stabilization of large tumors. The combination of NKTR-214 and neo-antigen vaccine VB10.NEO is currently being studied in a human trial.

[0954] As another example, a complex of an IL-15 mutant and an Fc-fusion of the IL-15Rα subunit (ALT-803) of IL-15R, which is reported to be an IL-2Rβγc agonist, was co-administered intravascularly with Bacillus Calmette-Guerin (BCG), an immune stimulant, and a vaccine for tuberculosis, in a carcinogen-induced rat non-muscle invasive bladder cancer (NMIBC) model. As a single treatment agent, ALT-803 reduced tumor burden by 35% compared to control whereas BCG alone only reduced the tumor burden by 15%. The combination of ALT-803 and BCG reduced tumor burden by 46% compared to control. The combination is currently being studied in human clinical trials.

[0955] Thus, IL-2Rβγc ligands and IL-2Rβγc constructs provided by the present disclosure can be used as adjuvants. An adjuvant refers to a compound that enhances the efficacy of a vaccine without directly participating in the protective immunity. For example, an IL-2Rβγc binding compound provided by the present disclosure can be used in conjunction with a cancer vaccine.

[0956] IL-2Rβγc ligands and IL-2Rβγc ligand constructs provided by the present disclosure can be useful for cell therapy when engineered to be expressed on the membrane surface of cells that also express the IL-2Rβγc subunits. Adoptive immunotherapy using NK cells or using re-targeted chimeric antigen receptor (CAR) T-cells is currently being studied as a treatment for neoplasms and viral infections. One challenge with these cell therapies is the suboptimal sustained survival of the infused cells.

[0957] DNA encoding an IL-2Rβγc ligand fused to a membrane protein in such a way that the IL-2Rβγc ligand is expressed on the extracellular surface of a cell can be constructed using standard techniques. When the fusion protein comprising the IL-2Rβγc ligand is expressed, IL-2 receptors on the cell become activated leading to long-term persistence of the cell.

[0958] As an example, a novel chimeric IL-2/IL-2Rβ fusion protein of IL-2 and its receptor subunit, IL-2Rβ, joined via a peptidyl linker (CIRB) has been reported. NK-92 cells expressing CIRB (NK-92^{CIRB}) were highly activated and expanded indefinitely without exogenous IL-2. When compared with an IL-2-secreting NK-92 cell line, NK-92^{CIRB} cells were more activated, cytotoxic, and resistant to growth inhibition than were NK-92 cells. In the presence of cancer cells, NK-92^{CIRB} cells exhibited enhanced cytotoxicity resulting in superior in vivo antitumor effects in mice.

[0959] As another example, co-expression of both a CAR and membrane-bound chimeric IL-15 (mbIL15) has been reported. IL-15 is known to act by activating IL-2Rβγc. The mbIL15-CAR T-cells showed T-cell persistence independent of CAR signaling and achieved potent rejection of CD19⁺ leukemia in an animal model. Long-lived T-cells possessed a memory-like transcriptional profile. The results demonstrated that CAR⁺ T-cells can be developed long-term persistence with a memory stem-cell phenotype sustained by signaling through mbIL15.

[0960] DNA encoding an IL-2Rβγc ligand can be incorporated into a cell and can be configured to produce an IL-2Rβγc ligand provided by the present disclosure. The IL-2Rβγc ligand can be secreted from the cell and can interact with the secreting cells (i.e., autocrine signaling) and/or cells in the vicinity of the secreting cell (i.e., paracrine signaling). A secreted IL-2Rβγc ligand or IL-2Rβγc ligand construct provided by the present disclosure can be an IL-2R agonist and can be designed to localize near the secreting cell.

[0961] An IL-2Rβγc ligand or IL-2Rβγc ligand construct provided by the present disclosure can be used to expand non-regulatory T-cells within a patient or within a biological sample. Methods of increasing the ratio of non-regulatory T-cells to Treg cells can comprise contacting a population of T-cells with an effective amount of an IL-2Rβγc ligand or IL-2Rβγc ligand construct. The ratio can be measured by determining the ratio of CD3+FOXP3+ cells to CD3+FOXP3-cells within the population of T-cells. A typical Treg frequency in human blood is 5% to 10% of the total CD4+CD3+ T-cells, however, in certain diseases this percentage may be lower or higher.

[0962] An IL-2Rβγc ligand or IL-2Rβγc ligand construct may be used to expand NK cells. NK cells modified with chimeric antigen receptors (CARs), which redirect immune cell activity to target cancer cells have been demonstrated to exhibit improved antitumor responses. CARs can comprise an antibody-derived extracellular domain, which binds to the desired tumor-associated antigen (TAA) and triggers an intracellular signaling cascade to activate the immune cell against the target cells.

[0963] NK cells can be genetically engineered for enhanced expression of one or more tumor targeting receptors such as NKG2D with membrane-bound IL-2Rβγc ligand, which can prolong the persistence and potency of the NK cells.

[0964] CAR T-cells can be genetically engineered to co-express a tethered form of an IL-2Rβγc ligand provided by the present disclosure to support in vivo persistence and maintenance of an immature state of differentiation and to exhibit in vivo antitumor activity.

[0965] IL-2Rβγc binding compounds, i.e., IL-2Rβγc ligands, tandem IL-2Rβγc ligands, and IL-2Rβγc ligand constructs provided by the present disclosure, can be incorporated into pharmaceutical compositions to be administered to a patient by any appropriate route of administration including intradermal, intramuscular, intraperitoneal, intravenous, subcutaneous, intranasal, epidural, oral, peroral, sublingual, intracerebral, intravaginal, transdermal, rectal, inhalation, or topical. A pharmaceutical composition provided by the present disclosure can be an injectable formulation. Pharmaceutical compositions provided by the present disclosure can be injectable intravenous formulations. Pharmaceutical compositions provided by the present disclosure can be oral formulations. Oral formulations may be oral dosage forms. A pharmaceutical composition may be formulated for intravenous administration or for subcutaneous administration.

[0966] Pharmaceutical compositions provided by the present disclosure may comprise a therapeutically effective amount of an IL-2Rβγc binding compound together with a suitable amount of one or more pharmaceutically acceptable vehicles so as to provide a composition for proper administration to a patient. Suitable pharmaceutical vehicles and methods of preparing pharmaceutical compositions are described in the art.

[0967] Assessing single patient response to therapy and qualifying a patient for optimal therapy are among the greatest challenges of modern healthcare and relate to trends in personalized medicine. IL-2Rβγc binding compounds can have target selectivity, for example, for certain cancers and immune cells. IL-2Rβγc binding compounds radiolabeled for positron emission tomography (PET) or Single Photon Emission Computed Tomography (SPECT) can be used to predict the targeting of the treatment based on a single-study, case-by-case patient analysis thus excluding patients that are expected not to benefit from treatment. PET/SPECT scans using IL-2Rβγc binding compounds, once correlated to the concentration can provide a three-dimensional distribution map, which can then be used for macroscopic dose calculations.

[0968] Accordingly, it is within the capability of those of skill in the art to assay and use IL-2Rβγc binding compounds and/or pharmaceutical compositions thereof for therapy.

[0969] IL-2Rβγc binding compounds, and/or pharmaceutical composition thereof can generally be used in an amount effective to achieve the intended purpose. For use to treat a disease such as cancer, an autoimmune disease or an inflammatory disease, an IL-2Rβγc binding compound, and/or pharmaceutical composition thereof, may be administered or applied in a therapeutically effective amount.

[0970] The amount of an IL-2Rβγc binding compound, and/or pharmaceutical composition of any of the foregoing that will be effective in the treatment of a particular disorder or condition disclosed herein will depend in part on the nature of the disorder or condition, and can be determined by standard clinical techniques known in the art. In addition, in vitro or in vivo assays may optionally be employed to help identify optimal dosage ranges. The amount of an IL-2Rβγc binding compound, and/or pharmaceutical composition of any of the foregoing administered will depend on, among other factors, the patient being treated, the weight of the patient, the severity of the affliction, the manner of administration and the judgment of the prescribing physician.

[0971] An IL-2Rβγc binding compound can be assayed in vitro and in vivo, for the desired therapeutic activity, prior to use in humans. For example, in vitro assays may be used to determine whether administration of a specific compound or a combination of compounds is preferred. The compounds can also be demonstrated to be effective and safe using animal model systems.

[0972] In certain embodiments, a therapeutically effective dose of an IL-2Rβγc binding compound, and/or pharmaceutical composition of any of the foregoing will provide therapeutic benefit without causing substantial toxicity. Toxicity of an IL-2Rβγc binding compound, and/or pharmaceutical compositions of any of the foregoing may be determined using standard pharmaceutical procedures and may be readily ascertained by the skilled artisan. The dose ratio between toxic and therapeutic effect is the therapeutic index. An IL-2Rβγc binding compound, and/or pharmaceutical composition of any of the foregoing exhibits a particularly high therapeutic index in treating disease and disorders. A dose of an IL-2Rβγc binding compound, and/or pharmaceutical composition of any of the foregoing will be within a range of circulating concentrations that include an effective dose with minimal toxicity.

[0973] An IL-2Rβγc binding compounds provided by the present disclosure or a pharmaceutical composition thereof may be included in a kit that may be used to administer the compound to a patient for therapeutic purposes. A kit may include a pharmaceutical composition comprising an IL-2Rβγc binding compounds provided by the present disclosure suitable for administration to a patient and instructions for administering the pharmaceutical composition to the patient. The kit can be a kit for treating cancer, for treating an autoimmune disease, or for treating an inflammatory disease. A kit for use in treating cancer in a patient can comprise an IL-2Rβγc binding compound provided by the present disclosure, a pharmaceutically acceptable vehicle for administering the compound, and instructions for administering the compound to a patient.

[0974] The pharmaceutical compositions can be included in a container, pack, or dispenser together with instructions for administration.

[0975] Instructions supplied with a kit may be printed and/or supplied, for example, as an electronic-readable medium, a video cassette, an audiotape, a flash memory device, or may be published on an internet web site or distributed to a patient and/or health care provider as an electronic communication.

[0976] An IL-2Rβγc binding compound provided by the present disclosure can be useful when combined with certain vaccines, including cancer neo-antigen vaccines. Mutations in tumor DNA produces new protein sequences that are foreign to the body. Vaccines can be designed to specifically activate a patient's immune system with respect to tumor-specific neo-antigens. When administered in combination with a neo-antigen vaccine, an IL-2Rβγc binding compound provided by the present disclosure can expand and proliferate neo-antigen-specific T-cells in the tumor microenvironment and thereby drive maximal expansion of vaccine-induced neo-antigen-specific T-cells for the treatment of cancer.

[0977] An IL-2Rβγc binding compound provided by the present disclosure can be used as an adjuvant. An adjuvant refers to a compound that enhances the efficacy of a vaccine without directly participating in the protective immunity. For example, an IL-2Rβγc binding compound provided by the present disclosure can be used in conjunction with a cancer vaccine or a viral vaccine.

[0978] An IL-2Rβγc binding compound provided by the present disclosure can be useful for cell therapy when engineered to be expressed on the membrane surface of cells that also express the IL-2Rβ and Rγc subunits. Adoptive immunotherapy using NK cells or using re-targeted chimeric antigen receptor (CAR) T-cells is currently being studied as a treatment for neoplasms and viral infections. One challenge with these cell therapies is the suboptimal sustained survival of the infused cells.

[0979] DNA encoding a ligand fused to a membrane protein in such a way that the IL-2Rβγc binding compound is expressed on the extracellular surface of a cell can be constructed using standard techniques. When a fusion protein comprising an IL-2Rβγc ligand and/or an IL-2Rβγc ligand is expressed, IL-2 receptors on the cell become activated leading to long-term persistence of the cell.

[0980] DNA encoding a ligand can be incorporated into a cell and can be configured to produce an IL-2Rβγc binding compound provided by the present disclosure. An IL-2Rβγc binding compound can be secreted from the cell and can interact with the secreting cells (i.e., autocrine signaling) and/or cells in the vicinity of the secreting cell (i.e., paracrine signaling). A secreted IL-2Rβγc binding compound provided by the present disclosure can be an IL-2R agonist and can be designed to localize near the secreting cell.

[0981] An IL-2Rβγc binding compound provided by the present disclosure can be used to expand T-cells within a patient or within a biological sample. Methods of increasing the ratio of non-regulatory T-cells to Treg cells can comprise contacting a population of T-cells with an effective amount of an IL-2Rβγc binding compound. The ratio can be measured by determining the ratio of CD3+FOXP3+ cells to CD3+FOXP3-cells within the population of T-cells. A typical Treg frequency in human blood is 5% to 10% of the total CD4+CD3+ T-cells, however, in certain diseases this percentage may be lower or higher.

[0982] An IL-2Rβγc binding compound may be used to expand T-cells. T-cells modified with chimeric antigen receptors (CARs), which redirect immune cell activity to target cancer cells have been demonstrated to exhibit improved antitumor responses. CARs can comprise an antibody-derived extracellular domain, which binds to the desired tumor-associated antigen (TAA) and triggers an intracellular signaling cascade to activate the immune cell against the target cells.

[0983] An IL-2Rβγc binding compound that are immobilized to a surface can be exposed to populations of T-cells in vitro or ex vivo to induce expansion of the cell population. Prior to transfer to a patient. CAR-T cells can be expanded by exposure to an immobilized form of an IL-2Rβγc binding compound. An immobilized an IL-2Rβγc binding compound can be separated from the CAR-T cells prior to transfer of the CAR-T cells to a patient.

[0984] CAR T-cells can be genetically engineered to co-express a tethered form of an IL-2Rβγc binding compound provided by the present disclosure to support in vivo persistence and maintenance of an immature state of differentiation and to exhibit in vivo antitumor activity.

[0985] Assessing single patient response to therapy and qualifying a patient for optimal therapy are among the greatest challenges of modern healthcare and relate to trends in personalized medicine. An IL-2Rβγc binding compound can have target selectivity, for example, for certain cancers and immune cells. An IL-2Rβγc binding compound radiolabeled for positron emission tomography (PET) or Single Photon Emission Computed Tomography (SPECT) can be used to predict the targeting of the treatment based on a single-study, case-by-case patient analysis thus excluding patients that are expected not to benefit from treatment. PET/SPECT scans using IL-2Rβγc binding compounds, once correlated to the concentration can provide a three-dimensional distribution map, which can then be used for dose calculations.

[0986] An IL-2Rβγc binding compound can comprise one or more imaging agents. An IL-2Rβγc binding compound can direct and localize the compound to cells, populations of cells, and tissue expressing IL-2R. The imaging compounds can comprise one or more imaging agents such as radiolabels, fluorescent labels, enzymatic labels, or PET imaging agents.

[0987] The imaging agents can be used to determine the number of cells expressing IL-2R, the expression level of cells expressing IL-2R, or properties of IL-2R such as the binding affinity of a particular IL-2Rβγc binding compound to IL-2R. The imaging agents can be used, for example, to evaluate cancer cells expressing the IL-2Rβ subunit and the Rγc subunit, or to evaluate Treg and/or Teff cells.

[0988] The label can be detected to determine a biodistribution of the compound in a patient or to assess the potential for therapeutic efficacy. For example, tumors expressing high levels of IL-2R may be attractive targets for therapeutic IL-2Rβγc binding compounds provided by the present disclosure.

[0989] The imaging agents can be used to evaluate cells expressing IL-2R before therapy, during therapy, and/or following therapy.

[0990] Imaging agents comprising a ligand can further comprise a moiety capable of binding to a cell surface and in particular to a protein expressed on the cell surface. The protein can be indicative of a certain cell type and is referred to as a cell surface marker. Imaging agents comprising both a ligand and a cell surface marker can be used to assess cells, a population of cells, and/or a tissue expressing IL-2R and the cell surface marker. Assessment can include determining the number of cells expressing IL-2R and the cell surface marker, the expression levels of IL-2R and the cell surface marker, and/or the binding affinity of the imaging agent to IL-2R and/or to the cell surface marker.

[0991] The imaging agents can be used to evaluate cells expressing IL-2R and the cell surface marker before therapy, during therapy, and/or following therapy.

[0992] An IL-2Rβγc binding compound provided by the present disclosure can be labeled. Labeled compounds can be useful in diagnostics.

[0993] An IL-2Rβγc binding compound provided by the present disclosure can be labeled with a detectable marker. The label can be used to determine a biodistribution of the compound in a patient or to assess the potential for therapeutic efficacy. For example, tumors expressing high levels of IL-2R may be attractive targets for selective IL-2R agonists and IL-2Rβγc binding compounds provided by the present disclosure.

[0994] An IL-2Rβγc binding compound provided by the present disclosure include labeled compounds. A labeled compound can be a detectable marker, for example, a radiolabeled amino acid or an attachment of biotinyl moieties to a polypeptide, wherein the attached biotinyl moieties can be detected by marked avidin such as streptavidin containing a fluorescent marker or enzymatic activity that can be detected by optical or colorimetric methods. Various methods of labeling polypeptides and glycoproteins are known in the art and may be used. Examples of labels for polypeptides include, for example, a radioisotope such as, ³H, ¹⁴C, ³⁵S, ¹²⁵I, and ¹³¹I, a fluorescent labels such as FITC, rhodamine, and lanthanide phosphors, an enzymatic label such as horseradish peroxidase, β-galactosidase, luciferase, and alkaline phosphatase, biotinyl groups, predetermined polypeptide epitopes recognized by a secondary reporter such as leucine zipper pair sequences, binding sites for secondary antibodies, metal ligands, and epitope tags. A label can be attached by spacer arms of various lengths to reduce potential steric hindrance.

[0995] An IL-2Rβγc binding compound provided by the present disclosure can be used, for example, to treat diseases such as cancer, an inflammatory disease, an autoimmune disease, an immunodeficiency or an infectious disease, including a viral disease such as COVID-19.

[0996] An IL-2Rβγc binding compound provided by the present disclosure and pharmaceutical compositions of any of the foregoing may be administered to a patient to treat an organ transplant.

[0997] An IL-2Rβγc binding compound provided by the present disclosure and pharmaceutical compositions of any of the foregoing may be administered to a patient together with another compound for treating an inflammatory disease or an autoimmune disease in the subject. The at least one other therapeutic agent may be an IL-2Rβγc binding compound provided by the present disclosure. An IL-2Rβγc binding compound and the at least one other therapeutic agent may act additively or synergistically. The at least one additional therapeutic agent may be included in the same pharmaceutical composition or vehicle comprising the IL-2Rβγc binding compound or may be in a separate pharmaceutical composition or vehicle. Accordingly, methods provided by the present disclosure further include, in addition to administering an IL-2Rβγc binding compound, administering one or more therapeutic agents effective for treating an inflammatory disease or an autoimmune disease or a different disease, disorder or condition than an inflammatory disease or an autoimmune disease. Methods provided by the present disclosure include administration of an IL-2Rβγc binding compound and one or more other therapeutic agents provided that the combined administration does not inhibit the therapeutic efficacy of an IL-2Rβγc binding compound and/or does not produce adverse combination effects.

[0998] An IL-2Rβγc binding compound provided by the present disclosure comprise treating a disease in a patient such as cancer, an inflammatory disease, or an autoimmune disease comprising administering to a patient in need thereof a therapeutically effective amount of a compound capable of binding to the specific binding site of the IL-2Rβ subunit and/or the Rγc subunit of IL-2R with an IC₅₀ of less than 100 μM, less than 10 μM, less than 1 μM, less than 100 nM, or less than 10 nM.

[0999] IL-2Rβγc binding compounds provided by the present disclosure may be used for treating cancer in a patient. The cancer can be, for example, a solid tumor or a metastasis.

[1000] IL-2Rβγc binding compounds provided by the present disclosure or a pharmaceutical composition thereof may be administered to treat a cancer known to be treated by activation of IL-2R. IL-2Rβγc binding compounds provided by the present disclosure or a pharmaceutical composition thereof may be administered to treat a cancer known to be treated by activation of the IL-2Rβγc subunits and where simultaneous activation of the IL-2Rα subunit compromises therapeutic efficacy and/or induces unwanted side effects.

[1001] IL-2Rβγc binding compounds provided by the present disclosure or pharmaceutical compositions thereof can be used to treat, for example, one or more of the following cancers: acute lymphoblastic leukemia, acute myeloid leukemia, adrenocortical carcinoma, appendix cancer, astrocytoma, atypical teratoid/rhabdoid tumor, basal cell carcinoma (nonmelanoma), B-cell lymphoma, bladder cancer, bone cancer, brain and spinal cord tumors, brain stem cancer, brain tumor, breast cancer, bronchial tumors, Burkitt lymphoma, carcinoid tumor, carcinoma of head and neck, central nervous system embryonal tumors, cerebellar astrocytoma, cerebral astrocytoma/malignant glioma, cervical cancer, chordoma, chronic lymphocytic leukemia, chronic myelogenous leukemia, colorectal cancer, craniopharyngioma, cutaneous T-cell lymphoma, desmoplastic small round cell tumor, ductal carcinoma, dye cancer, endocrine pancreas tumors (islet cell tumors), endometrial cancer, ependymoblastoma, esophageal cancer, esthesioneuroblastoma, Ewing family of tumors, extracranial germ cell tumor, extrahepatic bile duct cancer, gallbladder cancer, gastric cancer, gastrointestinal carcinoid tumor, gastrointestinal stromal tumor, gestational trophoblastic tumor, glioblastoma, glioma, hairy cell leukemia, head and neck cancer, heart cancer, hematopoetic tumors of the lymphoid lineage, hepatocellular cancer, Hodgkin lymphoma, hypopharyngeal cancer, hypothalamic and visual pathway glioma, IDs-related lymphoma, intraocular melanoma, islet cell tumors, Kaposi sarcoma, kidney cancer, Langerhans cell histiocytosis, laryngeal cancer, leukemia, lip and oral cavity cancer, male breast cancer, malignant fibrous histiocytoma, malignant germ cell tumors, malignant mesothelioma, medulloblastoma, melanoma, Merkel cell carcinoma, mesothelioma, mouth cancer, multiple endocrine neoplasia syndrome, multiple myeloma, mycosis fungoides, myelodysplastic, myeloproliferative neoplasms, nasal cavity and paranasal sinus cancer, nasopharyngeal cancer, neuroblastoma, non-Hodgkin lymphoma, non-small cell lung cancer, oral cancer, oropharyngeal cancer, osteosarcoma, ovarian cancer, ovarian epithelial cancer, ovarian germ cell tumor, ovarian low malignant potential tumor, pancreatic cancer, pancreatic neuroendocrine tumors (islet cell tumors), papillomatosis, paraganglioma, paranasal sinus and nasal cavity cancer, parathyroid cancer, penile cancer, pharyngeal cancer, pheochromocytoma, pineal parenchymal tumors, pineoblastoma and supratentorial primitive neuroectodermal tumors, pituitary tumor, plasma cell neoplasm/multiple myeloma, pleuropulmonary blastoma, pregnancy and breast cancer, primary central nervous system lymphoma, primary liver cancer, primary metastatic squamous neck cancer with occult, prostate cancer, rectal cancer, renal cell cancer, renal pelvis and ureter, respiratory tract carcinoma, retinoblastoma, rhabdomyosarcoma, salivary gland cancer, sarcoma, Sézary syndrome, skin cancer, small intestine cancer, soft tissue sarcoma, squamous cell carcinoma (nonmelanoma), stomach cancer, supratentorial primitive neuroectodermal tumors, T-cell lymphoma, testicular cancer, throat cancer, thymoma and thymic carcinoma, thyroid cancer, transitional cell cancer, urethral cancer, uterine sarcoma, vaginal cancer, visual pathway and hypothalamic glioma, vulvar cancer, Waldenström macroglobulinemia, Wilms tumor, and systemic and central metastases of any of the foregoing.

[1002] IL-2Rβγc binding compounds provided by the present disclosure or pharmaceutical compositions thereof can be used to treat solid tumors.

[1003] IL-2Rβγc binding compounds provided by the present disclosure or pharmaceutical compositions thereof can be used to treat tumor metastases.

[1004] IL-2Rβγc binding compounds provided by the present disclosure or pharmaceutical compositions thereof can be used to treat circulating tumor cells.

[1005] IL-2Rβγc binding compounds provided by the present disclosure or pharmaceutical compositions thereof can be used to treat, for example, a cancer selected from primary adult and childhood brain and CNS cancers including glioblastoma (GBM) and astrocytoma, skin cancers including melanoma, lung cancers including small cell lung cancers, non-small cell lung cancers (NSCLC), and large cell lung cancers, breast cancers including triple negative breast cancer (TNBC), blood cancers including myelodysplastic syndrome (MDS), multiple myeloma (MM), and acute myeloid leukemia (AML), prostate cancer including castrate resistant prostate cancer (CRPC), liver cancers including hepatocellular carcinoma (HCC), esophageal and gastric cancers, and any systemic and central metastases of any of the foregoing.

[1006] The amount of an IL-2Rβγc binding compound provided by the present disclosure, or pharmaceutical composition thereof that will be effective in the treatment of a cancer can depend, at least in part, on the nature of the disease, and may be determined by standard clinical techniques known in the art. In addition, in vitro or in vivo assays may be employed to help identify optimal dosing ranges. Dosing regimens and dosing intervals may also be determined by methods known to those skilled in the art. The amount of an IL-2Rβγc binding compound provided by the present disclosure administered may depend on, among other factors, the patient being treated, the weight of the patient, the severity of the disease, the route of administration, and the judgment of the prescribing physician.

[1007] For systemic administration, a therapeutically effective dose may be estimated initially from in vitro assays. Initial doses may also be estimated from in vivo data, e.g., animal models, using techniques that are known in the art. Such information may be used to more accurately determine useful doses in humans. One having ordinary skill in the art may optimize administration to humans based on animal data.

[1008] A dose of an IL-2Rβγc binding compound provided by the present disclosure and appropriate dosing intervals may be selected to maintain a sustained therapeutically effective concentration of the IL-2Rβγc binding compound provided by the present disclosure in the blood of a patient, and in certain embodiments, without exceeding a minimum adverse concentration.

[1009] A pharmaceutical composition comprising an IL-2Rβγc binding compound provided by the present disclosure may be administered, for example once per week, every 2 weeks, every 3 weeks, every 4 weeks, every 5 weeks, or every 6 weeks. Dosing may be provided alone or in combination with other drugs and may continue as long as required for effective treatment of the disease. Dosing may also be undertaken using continuous or semi-continuous administration over a period of time. Dosing includes administering a pharmaceutical composition to a mammal, such as a human, in a fed or fasted state.

[1010] A pharmaceutical composition may be administered in a single dosage form or in multiple dosage forms or as a continuous or an accumulated dose over a period of time. When multiple dosage forms are used the amount of an IL-2Rβγc binding compound provided by the present disclosure contained within each of the multiple dosage forms may be the same or different.

[1011] Suitable daily dosage ranges for administration can range, for example, from about 2 μg to about 200 mg of an IL-2Rβγc binding compound provided by the present disclosure per kilogram body weight.

[1012] Suitable daily dosage ranges for administration may range, for example, from about 1 μg to about 50 mg of an IL-2Rβγc binding compound provided by the present disclosure per square meter (m²) of body surface.

[1013] An IL-2Rβγc binding compound provided by the present disclosure may be administered to treat cancer in a patient in an amount, for example, from 0.001 mg/day to 100 mg/day, or in any other appropriate daily dose. A dose can be, for example, from 0.01 μg/kg body weight/week to 100 μg/kg body weight/week or any other suitable dose.

[1014] A pharmaceutical composition comprising an IL-2Rβγc binding compound provided by the present disclosure may be administered to treat cancer in a patient so as to provide a therapeutically effective concentration of an IL-2Rβγc binding compound provided by the present disclosure in the blood or plasma of the patient. A therapeutically effective concentration of a compound of an IL-2Rβγc binding compound provided by the present disclosure in the blood of a patient can be, for example, from 0.01 μg/L to 1,000 μg/L, from 0.1 μg/L to 500 μg/L, from 1 μg/L to 250 μg/L, or from about 10 μg/L to about 100 μg/L. A therapeutically effective concentration of an IL-2Rβγc binding compound provided by the present disclosure in the blood of a patient can be, for example, at least 0.01 μg/L, at least 0.1 μg/L, at least 1 μg/L, at least about 10 μg/L, or at least 100 μg/L. A therapeutically effective concentration of an IL-2Rβγc binding compound in the blood of a patient can be, for example, less than an amount that causes unacceptable adverse effects including adverse effects to homeostasis. A therapeutically effective concentration of an IL-2Rβγc binding compound in the blood of a patient can be an amount sufficient to restore and/or maintain homeostasis in the patient.

[1015] Pharmaceutical compositions comprising an IL-2Rβγc binding compound may be administered to treat a disease in a patient so as to provide a therapeutically effective concentration of the IL-2Rβγc binding compound in the blood of a patient for an extended period of time such as, for example, for at least 1 day, for at least 1 week, at least 2 weeks, at least 4 weeks, at least 5 week, or at least 6 weeks.

[1016] The amount of an IL-2Rβγc binding compound administered may vary during a treatment regimen.

[1017] Pharmaceutical compositions provided by the present disclosure may further comprise one or more pharmaceutically active compounds in addition to an IL-2Rβγc binding compound provided by the present disclosure. Such compounds may be provided, for example, to treat the cancer being treated with the IL-2Rβγc binding compound or to treat a disease, disorder, or condition other than the cancer being treated with the IL-2Rβγc binding compound, to treat a side-effect caused by administering the IL-2Rβγc binding compound, to augment the efficacy of the IL-2Rβγc binding compound, and/or to modulate the activity of the IL-2Rβγc binding compound.

[1018] An IL-2Rβγc binding compound provided by the present disclosure may be used in combination with at least one other therapeutic agent. An IL-2Rβγc binding compound may be administered to a patient together with another compound for treating cancer in the patient. The at least one other therapeutic agent can be a second, different IL-2Rβγc binding compound. An IL-2Rβγc binding compound and the at least one other therapeutic agent may act additively or, and in certain embodiments, synergistically with another IL-2Rβγc binding compound. The at least one additional therapeutic agent may be included in the same pharmaceutical composition or vehicle comprising the IL-2Rβγc binding compound or may be in a separate pharmaceutical composition or vehicle. Accordingly, methods provided by the present disclosure further include, in addition to administering an IL-2Rβγc binding compound, administering one or more therapeutic agents effective for treating cancer or a different disease, disorder or condition than cancer. Methods provided by the present disclosure include administration of an IL-2Rβγc binding compound and one or more other therapeutic agents provided that the combined administration does not inhibit the therapeutic efficacy of the IL-2Rβγc binding compound and/or does not produce adverse combination effects.

[1019] A pharmaceutical composition comprising an IL-2Rβγc binding compound may be administered concurrently with the administration of another therapeutic agent, which may be part of the same pharmaceutical composition as, or in a different pharmaceutical composition than that comprising an IL-2Rβγc binding compound. An IL-2Rβγc binding compound may be administered prior or subsequent to administration of another therapeutic agent. In certain combination therapies, the combination therapy may comprise alternating between administering an IL-2Rβγc binding compound and a composition comprising another therapeutic agent, e.g., to minimize adverse drug effects associated with a particular drug. When an IL-2Rβγc binding compound is administered concurrently with another therapeutic agent that potentially may produce an adverse drug effect including, for example, toxicity, the other therapeutic agent may be administered at a dose that falls below the threshold at which the adverse drug reaction is elicited.

[1020] A pharmaceutical composition comprising an IL-2Rβγc binding compound provided by the present disclosure may be administered with one or more substances, for example, to enhance, modulate and/or control release, bioavailability, therapeutic efficacy, therapeutic potency, and/or stability, of the IL-2Rβγc binding compound. For example, a pharmaceutical composition comprising an IL-2Rβγc binding compound can be co-administered with an active agent having pharmacological effects that enhance the therapeutic efficacy of the IL-2Rβγc binding compound.

[1021] An IL-2Rβγc binding compound, or a pharmaceutical composition thereof may be administered in conjunction with an agent known or believed to be effective in treating a disease such as cancer, an autoimmune disease or an inflammatory disease in a patient, such as the same disease being treated with the IL-2Rβγc binding compound.

[1022] An IL-2Rβγc binding compound, or a pharmaceutical composition thereof may be administered in conjunction with an agent known or believed to interfere with cell proliferation.

[1023] An IL-2Rβγc binding compound, or a pharmaceutical composition thereof may be administered in conjunction with an agent known or believed to interfere with cellular metabolism, to be an anti-metabolite, to interfere with RNA transcription, to interfere with RNA translation, to interfere with cellular protein synthesis, to interfere with synthesis of precursors for DNA synthesis and replication, to interfere with purine synthesis, to interfere with nucleoside synthesis, to interact with mTOR, to be an mTOR inhibitor, to interfere with cell cycle checkpoints.

[1024] An IL-2Rβγc binding compound or a pharmaceutical composition thereof may be administered in conjunction with a checkpoint inhibitor including a CTLA-4 inhibitor such as ipilimumab, a PD-1 inhibitor such as pembrolizumab and nivolumab, and/or a PD-LI inhibitor such as atezolizumab, avelumab, and durvalumab. An IL-2Rβγc binding compound or a pharmaceutical composition thereof may be administered in conjunction with an immunomodulator such as CD137/4-1BB, CD27, GIYR, and/or OC40.

[1025] An IL-2Rβγc binding compound or a pharmaceutical composition thereof may be administered in conjunction with an agent known or believed to be cytotoxic, to cause DNA damage, to cause cell cycle arrest, or to cause mitotic catastrophe.

[1026] An IL-2Rβγc binding compound or a pharmaceutical composition thereof may be administered in conjunction with an agent known or believed to modulate glutathione concentration, to modulate glutathione concentration within cells, to decrease glutathione concentration within cells, to reduce glutathione uptake into cells, to reduce glutathione synthesis, or to reduce glutathione synthesis within cells.

[1027] An IL-2Rβγc binding compound or a pharmaceutical composition thereof may be administered in conjunction with an agent known or believed to interfere with neovascularization, to reduce neovascularization, or to promote neovascularization.

[1028] An IL-2Rβγc binding compound or a pharmaceutical composition thereof may be administered in conjunction with an agent known or believed to interfere with hormone homeostasis, to interfere with hormone synthesis, to interfere with hormone receptor binding, or to interfere with hormone signal transduction.

[1029] An IL-2Rβγc binding compound or a pharmaceutical composition thereof may be administered in conjunction with an agent known or believed to interfere with growth factor homeostasis, to interfere with growth factor receptor expression, to interfere with growth factor binding to growth factor receptors, to interfere with growth factor receptor signal transduction, to interfere with the Hedgehog (Hh) signaling, to inhibit the Hedgehog pathway signaling, to inhibit ALK (anaplastic lymphoma kinase) pathway signaling, or to inhibit the non-homologous end joining (NHEJ) pathway.

[1030] An IL-2Rβγc binding compound or a pharmaceutical composition thereof may be administered in conjunction with one or more agents known or believed to be a VEGFR (vascular endothelial growth factor receptor) inhibitor, a RTK (receptor tyrosine kinase) inhibitor, a sodium channel current blocker, aFAK (focal adhesion kinase) inhibitor, a GLI (glioma-associated oncogene) inhibitor, a GLI1 inhibitor, a GLI2 inhibitor, a GLI3 inhibitor, a MAPK (mitogen-activated protein kinase) inhibitor, a MAPK/ERK pathway (also known as Ras-Raf-MEK-ERK pathways) inhibitor, a MEK1 inhibitor, a MEK2 inhibitor, a MEK5 inhibitor, a MEK5/ERK5 inhibitor, aRTA (renal tubular acidosis) inhibitor, a ALK (anaplastic lymphoma kinase) inhibitor, Aa LK kinase inhibitor, a nuclear translocation inhibitor, a PORCN (porcupine) inhibitor, a 5-ARI (5α-reductase inhibitor), topoisomerase inhibitor, a Ras (rat sarcoma) inhibitor, a K-ras inhibitor, a CERK (ceramide kinase) inhibitor, a PKB (protein kinase B, also known as AKT) inhibitor, a AKT1 inhibitor, EZH2 (enhancer of zeste homolog 2) inhibitor, a BET (bromodomain and extraterminal domain motif) inhibitor, a SYK (spleen tyrosine kinase) inhibitor, JAK (Janus kinase) inhibitors, a SYK/JAK inhibitor, a IDO (indoleamine-pyrrole 2,3-dioxygenase) inhibitor, a IDO1 inhibitor, a RXR (retinoic X receptors) activating agent, a selective RXR activating agent, a p-glycoprotein inhibitor, a ERK inhibitor, a PI3K (phosphatidylinositol-4,5-bisphosphate 3-kinase) inhibitor, a BRD (bromodomain-containing protein) inhibitor, a BRD2 inhibitor, a BRD3 inhibitor, a BRD4 inhibitor, a BRDT (bromodomain testis-specific protein) inhibitor, a reverse transcriptase inhibitor, a NRT (nucleoside analog reverse-transcriptase) inhibitor, a PIM (proviral integrations of moloney virus) inhibitor, a EGFR (epidermal growth factor receptor) inhibitor, a photosensitizer, a radiosensitizer, a ROS (proto-oncogene, receptor tyrosine kinase) inhibitor, a ROS1 (proto-oncogene 1) inhibitor, a CK (casein kinase) inhibitor, a CK2 inhibitor, a Bcr-Abl (breakpoint cluster region—Abelson proto-oncogene) tyrosine-kinase inhibitor such as dasatinib, a microtubule stabilizing agent, a microtubule depolymerization/disassembly inhibitor, a DNA intercalator, an androgen receptor antagonist, a chemoprotective agents, a HDAC (histone deacetylase) inhibitor, a DPP (dipeptidyl peptidase) inhibitor, a DPP-4 inhibitor, BTK (Bruton's tyrosine kinase) inhibitor, a kinase inhibitor such as imatinib, a tyrosine kinase inhibitor such as nilotinib, a ARP (poly (ADP-ribose) polymerase) inhibitor, a CDK (cyclin-dependent kinase) inhibitor, a CDK4 inhibitor, a CDK6 inhibitor, a CDK4/6 inhibitor, a HIF1α (hypoxia-inducible factor 1-a) inhibitor, a DNA ligase inhibitor, a DNA ligase IV inhibitor, a NHEJ (non-homologous end joining) inhibitor, a DNA ligase IV, a NHEJ inhibitor and a RAF inhibitor, a TKI and a RAF inhibitor, a TKI and RAF inhibitor such as sorafenib, a PDT (photodynamic therapy) sensitizer, an ATR (ataxia telangiectasia- and Rad3-related protein kinase) inhibitor, or a combination of any of the foregoing.

[1031] An IL-2Rβγc binding compound or a pharmaceutical composition thereof may be administered in conjunction with one or more chemotherapeutic agents, such as, for example, a VEGFR inhibitor such as fruquintinib, motesanib/AMG-706, vatalanib; a RTK inhibitor such as ponatinib; a sodium channel blocker such as GS967; a FAK inhibitor such as TAE226; a Gill and GLI2 inhibitor such as GANT61, a MEK inhibitor such as binimetinib; a RTA inhibitor such as linifanib; an ALK inhibitor such as brigstinib; bromopyruvic acid; a DNA alkylating agent such as thiotepa; nuclear translocations factors such as JSH-23; a PORCn inhibitor such as Wnt-059; a 5α-reductase inhibitor such as dutasteride; a topoisomerase inhibitor such as carubicin; a RAS inhibitor such as Kobe0065; a CerK inhibitor such as NVP-231; an AKT inhibitor such as uprosertib; a EZH2 inhibitor such as GSK-503; a BET bromodomain inhibitor such as OTX015; a MEK5/ERK5 inhibitor such as BIX02189; a Syl/JAK inhibitor such as cerdulatinib; an IDO1 inhibitor such as NLG919; a retinoic X receptor activating agent such as bexsrotene; a PGP inhibitor such as acotiamide or actotiamide HCl; an Erk inhibitor such SCH772984; a PI3K inhibitor such as gedatolisib; a JAK inhibitor such as ruxolitinib; an AKT inhibitor such as afuresertib or afuresertib HCl; an ALK1 inhibitor such as ceritinib; an HDAC inhibitor such as abexinostat; a DPP inhibitor such as oamarigliptin; an EGFR inhibitor such as gefittinib; an EZH2 inhibitor such as GSK126; a BTK inhibitor such as ibrutinib; a kinase inhibitor such as imatinin HCl; an IDO inhibitor such as INCB024360; a DNA crosslinker such as mitomycin C; a tyrosine kinase inhibitor such as nilotinib, a PARP inhibitor such as olaparib; a tubulin stabilization promoter such as paclitaxel; a CDK4/6 inhibitor such as palbociclib; a RTK inhibitor such as sunitinib; a PDT sensitizer such as tslsporfin; a p-glycoprotein inhibitor such as tariquidar; an ATR inhibitor such as VE-822; an HDAC inhibitor such as PCI-24781; a DPP inhibitor such as omarigliptin; an EGFR inhibitor such as gefinib; an EZH2 inhibitor such as GSK126; a BTK inhibitor such as irbrutinib; an IDO inhibitor such as INCB024360; or a combination of any of the foregoing.

[1032] For example, an IL-2Rβγc binding compound or a pharmaceutical composition thereof may be administered in conjunction with another chemotherapeutic agent, such as, for example, N-acetyl cysteine (NAC), adriamycin, alemtuzumab, amifostine, arsenic trioxide, ascorbic acid, bendamustine, bevacizumab, bortezomib, busulfan, buthionine sulfoxime, carfilzomib, carmustine, clofarabine, cyclophosphamide, cyclosporine, cytarabine, dasatinib, datinomycin, defibrotide, dexamethasone, docetaxel, doxorubicin, etoposide, filgrastim, floxuridine, fludarabine, gemcitabine, interferon alpha, ipilimumab, lenalidomide, leucovorin, melphalan, mycofenolate mofetil, paclitaxel, palifermin, panobinostat, pegfilrastim, prednisolone, prednisone, revlimid, rituximab, sirolimus, sodium 2-mercaptoethane sulfonate (MESNA), sodium thiosulfate, tacrolimus, temozolomide, thalidomide, thioguanine, thiotepa, topotecan, velcade, or a combination of any of the foregoing.

[1033] An IL-2Rβγc binding compound or a pharmaceutical compositions thereof can be used in combination therapy with other chemotherapeutic agents including one or more antimetabolites such as folic acid analogs; pyrimidine analogs such as fluorouracil, floxuridine, and cytosine arabinoside; purine analogs such as mercaptopurine, thiogunaine, and pentostatin; natural products such as vinblastine, vincristine, etoposide, tertiposide, dactinomycin, daunorubicin, doxurubicin, bleomycin, mithamycin, mitomycin C, L-asparaginase, and interferon alpha; platinum coordination complexes such as cis-platinum, and carboplatin; mitoxantrone; hydroxyurea; procarbazine; hormones and antagonists such as prednisone, hydroxyprogesterone caproate, medroxyprogesterone acetate, megestrol acetate, diethylstilbestrol, ethinyl estradiol, tamoxifen, testosterone propionate, fluoxymesterone, flutamide, and leuprolide, anti-angiogenesis agents or inhibitors such as angiostatin, retinoic acids, paclitaxel, estradiol derivatives, and thiazolopyrimidine derivatives; apoptosis prevention agents; triptolide; colchicine; luliconazole; and radiation therapy.

[1034] An IL-2Rβγc binding compound or a pharmaceutical composition thereof may be co-administered with a compound that inhibits DNA repair such as, for example, O6-benzylguanine (O6-BG).

[1035] An IL-2Rβγc binding compound or a pharmaceutical composition thereof may be administered in conjunction with one or more chemotherapeutic agents, such as, for example, abarelix, abiraterone, abiraterone acetate, n-acetyl cysteine, aclarubicin hydrochloride, adriamycin, adenine, afatinib, afatinib dimaleate, alemtuzumab, alendronate sodium, alitretinoin, allopurinol sodium, altretamine, amifostine, aminoglutethimide, aminolevulinic acid, amrubicin, amsacrine, anastrozole, angiostatin, apremilast, aprepitant, arsenic trioxide, ascorbic acid, l-asparaginase, azacitidine, azathioprine sodium, bazedoxifene (serm), belinostat, bendamustine hcl, O6-benzylguanine, bevacizumab, bexarotene, bicalutamide, biricodar, bleomycin sulfate, bortezomib, bosutinib, brivudine, buserelin, busulfan, buthionine sulfoxime, cabazitaxel, cabozantinib, capecitabine, carboplatin, carboquone, carfilzomib, carmofur, carmustine, ceritinib, chlorambucil, cisplatin, cladribine, clodronate disodium, clofarabine, crizotinib, cyclophosphamide, cyclosporine, cytarabine, cytosine arabinoside, dabrafenib, dacarbazine, dactinomycin, dasatinib, datinomycin, daunorubicin, decitabine, defribrotide, degarelix acetate, dexamethasone, dexrazoxane hydrochloride, diaziquone, diethyl stilbestrol, docetaxel, doxifluridine, doxorubicin hydrochloride, doxorubicin free base, dromostanolone propionate, dutasteride, eltrombopag, enzalutamide, epirubicin hydrochloride, eribulin mesylate, erlotinib hydrochloride, estramustine phosphate sodium, ethinyl estradiol, etoposide phosphate, etoposide, everolimus, exemestane, fentanyl, filgrastim, fingolimod, floxuridine, fludarabine phosphate, fluorouracil, fluoxymesterone, flutamide, formestane, formylmelphalan, fosaprepitant, fotemustine, fulvestrant, gefitinib, gemcitabine hydrochloride, gemcitabine free base, glutathione, glyciphosphoramide, glyfosfin, goserelin acetate, granisetron hydrochloride, heptaplatin, hexyl 5-aminolevulinate, histrelin acetate, hydroxyprogesterone caproate, hydroxyurea, ibandronate sodium, ibrutinib, icotinib, idarubicin HCl, idelalisib, idoxuridine, ifosfamide, interferon alpha, imatinib mesylate, imiquimod, ingenol mebutate, ipilimumab, irinotecan hydrochloride, ixabepilone, lanreotide acetate, lapatinib free base, lapatinib ditosylate, lasofoxifene, lenalidomide, letrozole, leucovorin calcium, leuprolide acetate, levamisole hydrochloride, levoleucovorin calcium, iobenguane, lobaplatin, lomustine, maropitant, masoprocol, mechlorethamine hydrochloride, megestrol acetate, medroxyprogesterone acetate, melphalan hydrochloride, mercaptopurine, mercaptoethane sulfonate sodium, methotrexate, methoxsalen, methyl aminolevulinate, methylene blue, methylisoindigotin, mifamurtide, miltefosine, miriplatin, mithamycin, mitobronitol, mitomycin C, mitotane, mitoxantrone hydrochloride, mycophenolate mofetil, nabiximols, nafarelin, nandrolone, nedaplatin, nelarabine, netupitant, nilotinib, nilutamide, nimustine, nintedanib, nocodazole, octreotide, olaparib, omacetaxine mepesuccinate, ondansetron hydrochloride, oxaliplatin, paclitaxel, palbociclib, palifermin, palonosetron hydrochloride, pamidronate disodium, panobinostat, pasireotide, pazopanib hydrochloride, pegfilrastim, pemetrexed disodium, pentostatin, peplomycin, pipobroman, pirarubicin, plerixafor, plicamycin, pomalidomide, ponatinib, porfimer sodium, porfiromycin, pralatrexate, prednimustine, prednisolone, prednisone, procarbazine hydrochloride, quinagolide hydrochloride, raloxifene, raltitrexed, radotinib, ranimustine, retinoic acids, revlimide, rituxinab, romidepsin, ruxolitinib, ruxolitinib phosphate, semustine, sirolimus, sodium thiosulfate, sorafenib free base, sorafenib tosylate, streptozocin, sufentanil, sunitinib, tacrolimus, talaporfin sodium, tamibarotene, tamoxifen citrate, tapentadol, temoporfin, temozolomide, temsirolimus, teniposide, teriflunomide, tertiposide, testolactone, testosterone propionate, thalidomide, thioguanine, thiotepa, thymalfasin, toceranib phosphate, topotecan hydrochloride, toremifene citrate, trabectedin, trametinib, tretinoin, trilostane, triptorelin, tropisetron, uramustine, valrubicin, vandetanib, vedotin, vemurafenib, verteporfin, vinblastine, vincristine sulfate, vincristine free base, vindesine, vinorelbine tartrate, vorinostat, and zoledronic acid.

[1036] An IL-2Rβγc binding compound or a pharmaceutical composition thereof may be administered in conjunction with one or more chemotherapeutic agents such as, for example, abemaciclib, abiraterone acetate, ABVD, ABVE, ABVE-PC, AC, acalabrutinib, AC-T, ADE, ado-trastuzumab emtansine, afatinib dimaleate, aldesleukin, alectinib, alemtuzumab, alpelisib, amifostine, aminolevulinic acid hydrochloride, anastrozole, apalutamide, aprepitant, arsenic trioxide, asparaginase Erwinia chrysanthemi, atezolizumab, avelumab, axicabtagene ciloleucel, axitinib, azacitidine, BEACOPP, belinostat, bendamustine hydrochloride, BEP, bevacizumab, bexarotene, bicalutamide, binimetinib, bleomycin sulfate, blinatumomab, bortezomib, bosutinib, brentuximab vedotin, brigatinib, BuMel, busulfan, cabazitaxel, cabozantinib-s-malate, CAF, calaspargase pegol-mknl, capecitabine, caplacizumab-yhdp, CAPDX, carboplatin, carboplatin-taxol, carfilzomib, carmustine, carmustine implant, CEM, cemiplimab-rwlc, ceritinib, cetuximab, CEV, chlorambucil, chlorambucil-prednisone, CHOP, cisplatin, cladribine, clofarabine, CMF, cobimetinib, copanlisib hydrochloride, COPDAC, COPP, COPP-ABV, crizotinib, CVP, cyclophosphamide, cytarabine, cytarabine liposome, dabrafenib mesylate, dacarbazine, dacomitinib, dactinomycin, daratumumab, darbepoetin a, dasatinib, daunorubicin hydrochloride, daunorubicin hydrochloride and cytarabine liposome, decitabine, defibrotide sodium, degarelix, denileukin diftitox, denosumab, dexamethasone, dexrazoxane hydrochloride, dinutuximab, docetaxel, doxorubicin hydrochloride, doxorubicin hydrochloride liposome, durvalumab, duvelisib, elotuzumab, eltrombopag olamine, emapalumab-lzsg, enasidenib mesylate, encorafenib, enzalutamide, epirubicin hydrochloride, EPOCH, epoetin alfa, erdafitinib, eribulin mesylate, erlotinib hydrochloride, etoposide, etoposide phosphate, everolimus, exemestane, fec, filgrastim, fludarabine phosphate, fluorouracil injection, fluorouracil—topical, flutamide, folfiri, folfiri-bevacizumab, folfiri-cetuximab, folfirinox, folfox, fostamatinib disodium, FU-LV, fulvestrant, gefitinib, gemcitabine hydrochloride, gemcitabine-cisplatin, gemcitabine-oxaliplatin, gemtuzumab ozogamicin, gilteritinib fumarate, glasdegib maleate, glucarpidase, goserelin acetate, granisetron, HPV bivalent vaccine, HPV bivalent vaccine, recombinant HPV nonavalent vaccine, HPV nonavalent vaccine, recombinant, HPV quadrivalent vaccine, HPV uadrivalent vaccine recombinant, hydroxyurea, hyper-CVAD, ibritumomab tiuxetan, ibrutinib, ICE, idarubicin hydrochloride, idelalisib, ifosfamide, imatinib mesylate, imiquimod, inotuzumab ozogamicin, interferon α-2b recombinant, iobenguane ¹³¹I, ipilimumab, irinotecan hydrochloride, irinotecan hydrochloride liposome, ivosidenib, ixabepilone, ixazomib citrate, JEB, lanreotide acetate, lapatinib ditosylate, larotrectinib sulfate, lenalidomide, lenvatinib mesylate, letrozole, leucovorin calcium, leuprolide acetate, lomustine, lorlatinib, lutetium Lu 177-dotatate, mechlorethamine hydrochloride, megestrol acetate, melphalan, melphalan hydrochloride, mercaptopurine, mesna, methotrexate, methylnaltrexone bromide, midostaurin, mitomycin c, mitoxantrone hydrochloride, mogamulizumab-kpkc, moxetumomab pasudotox-tdfk, MVAC, necitumumab, nelarabine, neratinib maleate, netupitant and palonosetron hydrochloride, nilotinib, nilutamide, niraparib tosylate monohydrate, nivolumab, obinutuzumab, OEPA, ofatumumab, OFF, olaparib, olaratumab, omacetaxine mepesuccinate, ondansetron hydrochloride, OPPA, osimertinib mesylate, oxaliplatin, paclitaxel, paclitaxel albumin-stabilized nanoparticle formulation, PAD, palbociclib, palifermin, palonosetron hydrochloride, palonosetron hydrochloride and netupitant, pamidronate disodium, panitumumab, panobinostat, pazopanib hydrochloride, PCV, PEB, pegaspargase, pegfilgrastim, peginterferon α-2b, pembrolizumab, pemetrexed disodium, pertuzumab, plerixafor, polatuzumab vedotin-piiq, pomalidomide, ponatinib hydrochloride, pralatrexate, prednisone, procarbazine hydrochloride, propranolol hydrochloride, radium 223 dichloride, raloxifene hydrochloride, ramucirumab, rasburicase, ravulizumab-cwvz, R-CHOP, R-CVP, recombinant HPV bivalent vaccine, recombinant HPV nonavalent vaccine, recombinant HPV quadrivalent vaccine, recombinant interferon α-2b, regorafenib, R-EPOCH, ribociclib, R-ICE, rituximab, rituximab and hyaluronidase human, rolapitant hydrochloride, romidepsin, romiplostim, rucaparib camsylate, ruxolitinib phosphate, siltuximab, sipuleucel-t, sonidegib, sorafenib tosylate, STANFORD V, sunitinib malate, TAC, tagraxofusp-erzs, talazoparib tosylate, talc, talimogene laherparepvec, tamoxifen citrate, temozolomide, temsirolimus, thalidomide, thioguanine, thiotepa, tisagenlecleucel, tocilizumab, topotecan hydrochloride, toremifene, TPF, trabectedin, trametinib, trastuzumab, trastuzumab and hyaluronidase-oysk, trifluridine and tipiracil hydrochloride, uridine triacetate, VAC, Valrubicin, VAMP, vandetanib, VeIP, vemurafenib, venetoclax, vinblastine sulfate, vincristine sulfate liposome, vinorelbine tartrate, vip, vismodegib, vorinostat, XELIRI, XELOX, Ziv-aflibercept, zoledronic acid, and combinations of any of the foregoing.

[1037] The efficacy of administering an IL-2Rβγc binding compound or a pharmaceutical composition thereof for treating cancer may be assessed using in vitro and animal studies and in clinical trials.

[1038] The suitability of an IL-2Rβγc binding compound or a pharmaceutical composition thereof in treating cancer may be determined by methods described in the art. For example, screens developed to demonstrate the anti-tumor activity of oncolytic agents are known (Miller, et al., J Med Chem, 1977, 20(3), 409-413; Sweeney, et al., Cancer Res, 1978, 38(9), 2886-2891; and Weiss and Von Hoff, Semin Oncol, 1985, 12(3 Suppl 4), 69-74).

[1039] An IL-2Rβγc binding compound or a pharmaceutical composition thereof can be useful in treating inflammatory diseases.

[1040] An IL-2Rβγc binding compound or a pharmaceutical composition thereof may be administered to treat an inflammatory disease.

[1041] Examples of inflammatory diseases include allergy, Alzheimer's disease, anemia, ankylosing spondylitis, arthritis, atherosclerosis, asthma, autism, arthritis, carpal tunnel syndrome, celiac disease, colitis, Crohn's disease, congestive heart failure, dermatitis, diabetes, diverticulitis, eczema, fibromyalgia, fibrosis, gall bladder disease gastroesophageal reflux disease, Hashimoto's thyroiditis, heart attack, hepatitis, irritable bowel syndrome, kidney failure, lupus, multiple sclerosis, nephritis, neuropathy, pancreatitis, Parkinson's disease, psoriasis, polymyalgia rheumatica, rheumatoid arthritis, scleroderma, stroke, surgical complications, and ulcerative colitis.

[1042] An IL-2Rβγc binding compound or a pharmaceutical composition thereof can be useful in treating autoimmune diseases. Autoimmune diseases can be defined as human diseases in which the immune system attacks its own proteins, cells, and/or tissues. A comprehensive listing and review of autoimmune diseases can be found, for example, in The Autoimmune Diseases, Rose and Mackay, 2014, Academic Press.

[1043] An IL-2Rβγc binding compound or a pharmaceutical composition thereof may be administered to treat an autoimmune disease.

[1044] Examples of autoimmune diseases include Addison's disease, agammaglobulinemia, alopecia areata, amyloidosis, ankylosing spondylitis, anti-GBM/anti-TBN nephritis, antiphospholipid syndrome, autoimmune angioedema, autoimmune dysautonomia, autoimmune encephalomyelitis, autoimmune hepatitis, autoimmune inner ear disease, autoimmune myocarditis, autoimmune pancreatitis, autoimmune retinopathy, autoimmune urticaria, axonal and neuronal neuropathy, Balo disease, Behcet's disease, benign mucosal pemphigoid, bullous pemphigoid, Castleman disease, celiac disease, Chagas disease, chronic inflammatory demyelinating polyneuropathy, chronic recurrent multifocal osteomyelitis, Churg-Strauss, cicatricial pemphigoid, Cogan' syndrome, cold agglutinin disease, congenital heart block, Coxcackie myocarditits, CREST syndrome, Crohn's disease, dermatitis herpetiformis, dermatomyositis, Devic's disease, discoid lupus, Dressler's syndrome, endometriosis, eosinophilic esophagitis, eosinophilic fasciitis, erythema nodosum, essential mixed cryoglobulinemia, Evans syndrome, fibromyalgia, fibrosing alveolitis, giant cell arteritis, giant cell myocarditis, glomerulonephritis, Goodpasture's syndrome, granulomatosis with polyangiitis, Graves' disease, Gullain-Barre syndrome, Hashimoto's thyroiditis, hemolytic anemia, Henoch-Schonlein purpura, herpes gestationis or pemphigoid gestationis, hypogammaglobulinemia, IgA nephropathy, IgG4-related sclerosing disease, immune thrombocytopenic purpura, inclusion body myositis, interstitial cystitis, juvenile arthritis, juvenile diabetes, juvenile myositis, Kawasaki disease, Lambert-Eaton syndrome, leukocytoclastic vasculitis, lichen planus, lichen sclerosus, ligneous conjunctivitis, linear IgA disease, lupus, Lyme disease chronic, Meniere's diseases, microscopic polyangiitis, mixed connective tissue disease, Mooren's ulcer, Mucha-Habermann disease, multiple sclerosis, myasthenia gravis, myositis, narcolepsy, neuromyelitis, optica, neutropenia, ocular cicatricial pemphigoid, optic neuritis, palindromic rheumatism, PANDAS, paraneoplastic cerebellar degeneration, paroxysmal nocturnal hemoglobinuria, Parry Romberg syndrome, pars planitis, Parsonnage-Turner syndrome, pemphigus, peripheral neuropathy, perivenous encephalomyelitis, pernicious anemia, POEMS syndrome, polyarteritis nodosa, polyglandular syndromes, polymyalgia rheumatica, polymyositis, postmyocardial infarction syndrome, postpericardiotomy syndrome, primary biliary cirrhosis, primary sclerosing cholangitis, progesterone dermatitis, psoriasis, psoriatic arthritis, pure red cell aplasia, pyoderma gangrenosum, Raynaud's phenomenon, reactive arthritis, reflex sympathetic dystrophy, relapsing polychondritis, restless legs syndrome, retroperitoneal fibrosis, rheumatic fever, rheumatoid arthritis, sarcodosis, Schmidt syndrome, scleritis, scleroderma, Sjogren's syndrome, sperm and testicular autoimmunity, stiff person syndrome, subacute bacterial endocarditis, Susac's syndrome, sympathetic ophthalmia, Takayasu's arteritis, temporal arteritis, thrombocytopenic purpura, Tolosa-Hunt syndrome, transverse myelitis, type 1 diabetes, ulcerative colitis, undifferentiated connective tissue disease, uveitis, vaculitis, vitiligo, and Wegener's granulomatosis.

[1045] An IL-2Rβγc binding compound or a pharmaceutical composition thereof can be use to treat autoimmune disorders such as, for example, lupus, graft-versus-host disease, hepatitis C-induced vasculitis, Type I diabetes, multiple sclerosis, spontaneous loss of pregnancy, atopic diseases, and inflammatory bowel diseases.

[1046] An IL-2Rβγc binding compound can be administered with one or more additional therapeutic agents for treating an autoimmune disease. An IL-2Rβγc binding compound or a pharmaceutical composition thereof may be administered in conjunction with one or more immunosuppressants including, for example, corticosteroids such as prednisone, budesonide, and prednisolone; Janus kinase inhibitors such as tofacitinib; calcineurin inhibitors such as cyclosporine and tacrolimus; mTOR inhibitors such as sirolimus and everolimus; IMDH inhibitors such as azathioprine, leflunomide, and mycophenolate; biologics such as abatacept adalimumab, anakinra, certolizumab, etanercept, golimumab, infliximab, ixekizumab, natalizumab, rituximab, secukinumab, tocilizumab, ustekinumab, and vedolizumab; and monoclonal antibodies such as basiliximab and daclizumab.

[1047] An IL-2Rβγc binding compound or a pharmaceutical composition thereof may be administered to a patient to treat a disease associated with the activation, proliferation, metabolism, and/or differentiation of T-cells.

[1048] An IL-2Rβγc binding compound or a pharmaceutical composition thereof may be administered to a patient to treat an organ transplant.

[1049] An IL-2Rβγc binding compound or a pharmaceutical composition thereof may be administered in conjunction with an agent known or believed to interfere with proliferation, to interfere with mitosis, to interfere with DNA replication, or to interfere with DNA repair.

[1050] An IL-2Rβγc binding compound or a pharmaceutical composition thereof may be administered to a patient to treat an immune deficiency disease.

[1051] Examples of primary immune deficiency disease include autoimmune lymphoproliferative syndrome, autoimmune polyglandular syndrome type 1, BENTA disease, caspase eight deficiency state, CARDS deficiency, chronic granulomatous disease, common variable immunodeficiency, congenital neutropenia syndromes, CTLA4 deficiency, DOCK8 deficiency, GATA2 deficiency, glycosylation disorders, hyper-immunoglobulin E syndromes, hyper-immunoglobulin M syndromes, interferon γ, interleukin 12 and interleukin 23 deficiency, leukocyte adhesion deficiency, LRBA deficiency, PI2 kinase disease, PLCG2-associated antibody deficiency and immune dysregulation, severe combined immunodeficiency, STAT3 dominant-negative disease, STAT3 gain-of-function disease, warts, hypogammaglobulinemia, infections, and myelokathexis syndrome, Wiskott-Aldrich syndrome, X-linked agammaglobulinemia, X-linked lymphoproliferative disease, and XMEN disease.

[1052] Secondary immune deficiency disease occurs when the immune system is compromised to an environmental factor such as infection, chemotherapy, severe burns, or malnutrition. Examples of secondary immune deficiency diseases include newborn immunodeficiencies such as immature lymphoid organs, absent memory immunity, low maternal IgG levels, decreased neutrophil storage pool, decreased neutrophil function, and decreased natural killer cell activity; advanced age related immunodeficiencies such as decreased antigen-specific cellular immunity, T-cell oligoconality, and restricted B-cell repertoire; malnutrition related immunodeficiencies such as decreased cellular immune response and weekend mucosal barriers; diabetes mellitus related immunodeficiencies such as decreased mitogen-induced lymphoproliferation, defective phagocytosis, and decreased chemotaxis; chronic uremia related immunodeficiencies such as decreased cellular immune response, decreased generation of memory antibody responses, and decreased chemotaxis; genetic syndromes such as defective phagocytosis, defective chemotaxis, and variable defects of antigen-specific immune responses; and anti-inflammatory, immunomodulatory, and immuno-suppressive drug therapy related immune deficiencies such as lymphopenia, decreased cellular immune response and anergy, decreased proinflammatory cytokines, decreased phagocytosis, decreased chemotaxis, neutropenia, and weakened mucosal barriers; environmental conditions such as increased lymphocyte apoptosis, increased secretion of tolerogenic cytokines, cytopenia, decreased cellular immunity and anergy, and stress-induced nonspecific immune activation; and infectious diseases such as T-cell lymphopenia, decreased cellular immune response and anergy, and defective antigen-specific antibody responses.

[1053] An IL-2Rβγc binding compound or a pharmaceutical composition thereof may be administered to a patient to increase the immune response in immuno-compromised patients.

[1054] An IL-2Rβγc binding compound or a pharmaceutical composition thereof may be administered to a patient to increase the immune response in the patient.

[1055] An IL-2Rβγc binding compound or a pharmaceutical composition thereof may be administered to a patient to treat an infectious disease.

[1056] Examples of infectious diseases include Acinetobacter infections, actinomycosis, African sleeping sickness (African trypanosomiasis), AIDS (acquired immunodeficiency syndrome), amoebiasis, anaplasmosis, angiostrongyliasis, anisakiasis, anthrax, Arcanobacterium haemolyticum infection, Argentine hemorrhagic fever, ascariasis, aspergillosis, astrovirus infection, babesiosis, Bacillus cereus infection, bacterial meningitis, bacterial pneumonia, bacterial vaginosis, Bacteroides infection, balantidiasis, bartonellosis, Baylisascaris infection, Bejel, syphilis, yaws, BK virus infection, black piedra, blastocystosis, blastomycosis, Bolivian hemorrhagic fever, botulism (and Infant botulism), Brazilian hemorrhagic fever, brucellosis, bubonic plague, Burkholderia infection, buruli ulcer, calicivirus infection (Norovirus and Sapovirus), campylobacteriosis, candidiasis (Moniliasis; Thrush), capillariasis, carrion's disease, cat-scratch disease, cellulitis, Chagas disease (American trypanosomiasis), chancroid, chickenpox, chikungunya, chlamydia, Chlamydophila pneumoniae infection (Taiwan acute respiratory agent or TWAR), cholera, chromoblastomycosis, Chytridiomycosis, clonorchiasis, Clostridium difficile colitis, coccidioidomycosis, Colorado tick fever (CTF), common cold (acute viral rhinopharyngitis; Acute coryza, Coronavirus disease 2019 (COVID-19), Creutzfeldt-Jakob disease (CJD), Crimean-Congo hemorrhagic fever (CCHF), cryptococcosis, cryptosporidiosis, cutaneous larva migrans (CLM), cyclosporiasis, cysticercosis, cytomegalovirus infection, Dengue fever, desmodesmus infection, dientamoebiasis, diphtheria, diphyllobothriasis, dracunculiasis, Ebola hemorrhagic fever, echinococcosis, Ehrlichiosis, enterobiasis (pinworm infection), Enterococcus infection, enterovirus infection, epidemic typhus, Epstein-Barr virus infectious mononucleosis (Mono), erythema infectiosum (Fifth disease), fxanthem subitum (Sixth disease), fasciolosis, fasciolopsiasis, fatal familial insomnia (FFI), filariasis, food poisoning by Clostridium perfringens, free-living amebic infection, Fusobacterium infection, gas gangrene (Clostridial myonecrosis), geotrichosis, Gerstmann-Str-ussler-Scheinker syndrome (GSS), giardiasis, glanders, gnathostomiasis, gonorrhea, granuloma inguinale (Donovanosis), Group A streptococcal infection, Group B streptococcal infection, Haemophilus influenzae infection, hand, foot and mouth disease (HFMD), Hantavirus Pulmonary Syndrome (HPS), Heartland virus disease, Helicobacter pylori infection, hemolytic-uremic syndrome (HUS), hemorrhagic fever with renal syndrome (HFRS), Hendra virus infection, Hepatitis A, Hepatitis B, Hepatitis C, Hepatitis D, Hepatitis E, Herpes simplex, histoplasmosis, hookworm infection, human bocavirus infection, human ewingii ehrlichiosis, human granulocytic anaplasmosis (HGA), human metapneumovirus infection, human monocytic ehrlichiosis, human papillomavirus (HPV) infection, human parainfluenza virus infection, hymenolepiasis, influenza (flu), isosporiasis, Kawasaki disease, keratitis, Kingella kingae infection, Kuru, Lassa fever, Legionellosis (Legionnaires' disease), leishmaniasis, leprosy, leptospirosis, listeriosis, Lyme disease (Lyme borreliosis), lymphatic filariasis (elephantiasis), lymphocytic choriomeningitis, malaria, Marburg hemorrhagic fever (MHF), measles, melioidosis (Whitmore's disease), meningitis, meningococcal disease, metagonimiasis, microsporidiosis, Middle East respiratory syndrome (MERS), molluscum contagiosum (MC), monkeypox, mumps, murine typhus (Endemic typhus), mycetoma, Mycoplasma genitalium infection, mycoplasma pneumonia, myiasis, neonatal conjunctivitis (Ophthalmia neonatorum), Nipah virus infection, nocardiosis, Norovirus (children and babies), onchocerciasis (River blindness), opisthorchiasis, paracoccidioidomycosis (South American blastomycosis), paragonimiasis, pasteurellosis, pediculosis capitis (Head lice), pediculosis corporis (Body lice), pediculosis pubis (pubic lice, crab lice), pelvic inflammatory disease (PID), pertussis (whooping cough), plague, pneumococcal infection, pneumocystis pneumonia (PCP), pneumonia, poliomyelitis, Pontiac fever, Prevotella infection, primary amoebic meningoencephalitis (PAM), progressive multifocal leukoencephalopathy, psittacosis, Q fever, rabies, relapsing fever, respiratory syncytial virus infection, rhinosporidiosis, rhinovirus infection, rickettsial infection, rickettsialpox, Rift Valley fever (RVF), Rocky Mountain spotted fever (RMSF), rotavirus infection, rubella, salmonellosis, SARS (severe acute respiratory syndrome), scabies, scarlet fever, schistosomiasis, sepsis, shigellosis (bacillary dysentery), shingles (Herpes zoster), smallpox (variola), sporotrichosis, staphylococcal food poisoning, staphylococcal infection, strongyloidiasis, subacute sclerosing panencephalitis, taeniasis, tetanus (lockjaw), tinea barbae (barber's itch), tinea capitis (ringworm of the scalp), tinea corporis (ringworm of the body), tinea cruris (Jock itch), tinea manum (ringworm of the hand), tinea nigra, tinea pedis (athlete's foot), tinea unguium (onychomycosis), tinea versicolor (Pityriasis versicolor), toxocariasis (ocular larva migrans (OLM)), toxocariasis (visceral larva migrans (VLM)), toxoplasmosis, trachoma, trichinosis, trichomoniasis, trichuriasis (whipworm infection), tuberculosis, tularemia, typhoid fever, typhus fever, Ureaplasma urealyticum infection, valley fever, Venezuelan equine encephalitis, Venezuelan hemorrhagic fever, vibrio parahaemolyticus enteritis, vibrio vulnificus infection, viral pneumonia, West Nile fever, white piedra (tinea blanca), yellow fever, Yersinia pseudotuberculosis infection, yersiniosis, zeaspora, Zika fever, and zygomycosis.

[1057] An IL-2Rβγc binding compound provided by the present disclosure can be used, either alone or in combination, to treat diseases including acute myeloid leukemia, B-cell lymphoma, chronic myelogenous leukemia, depression, gingival recession, hepatitis C, HIV infections, human papillomavirus, idiopathic CD4 lymphopenia, immunodeficiency secondary to organ transplantation, lipodystrophy, Kaposi sarcoma lymphoma, lymphopenia, mantle cell lymphoma, multiple sclerosis, myelodysplastic syndrome, non-Hodgkin lymphoma, recurrent adult diffuse large cell lymphoma, recurrent follicular lymphoma, rheumatoid arthritis, sepsis, and Type 2 diabetes.

[1058] An IL-2Rβγc binding compound provided by the present disclosure can be used to treat cancers such as metastatic breast cancer, breast cancer, colon cancer, bladder cancer, metastatic prostate cancer, stage IV prostate cancer, castration-resistant prostate carcinoma, neuroblastoma, melanoma, kidney cancer, myeloproliferative neoplasm, sarcoma, and neurodermal tumors.

[1059] An IL-2Rβγc binding compound provided by the present disclosure can be used in combination with temozolomide to great glioblastoma, with atezolizumab to treat skin cancers such as MCC, C5CC and melanoma, with pembrolizumab to treat triple negative breast cancer, and in combination with CAR-T therapy to treat pediatric acute lymphoblastic leukemia.

[1060] An IL-2Rβγc binding compound or a pharmaceutical composition thereof may be administered to a patient together with another compound for treating an inflammatory disease or an autoimmune disease in the patient. The at least one other therapeutic agent may be a different IL-2Rβγc binding compound provided by the present disclosure. An IL-2Rβγc binding compound and the at least one other therapeutic agent may act additively or synergistically. The at least one additional therapeutic agent may be included in the same pharmaceutical composition or vehicle comprising the IL-2Rβγc binding compound or may be in a separate pharmaceutical composition or vehicle. Accordingly, methods provided by the present disclosure further include, in addition to administering an IL-2Rβγc binding compound, administering one or more therapeutic agents effective for treating an inflammatory disease or an autoimmune disease or a different disease, disorder or condition than an inflammatory disease or an autoimmune disease. Methods provided by the present disclosure include administering IL-2Rβγc binding compound and one or more other therapeutic agents provided that the combined administration does not inhibit the therapeutic efficacy of the IL-2Rβγc binding compound and/or does not produce adverse combination effects.

[1061] IL-2Rβγc binding compounds provided by the present disclosure can be useful in vitro as tools for understanding the biological role of IL-2, including the evaluation of the many factors thought to influence, and be influenced by, the production of IL-2 and the receptor binding process. The present compounds are also useful in the development of other compounds that bind to and activate the IL-2R, because the present compounds provide useful information concerning the relationship between structure and activity that should facilitate such development.

[1062] The IL-2Rβγc binding compounds are also useful as competitive binders in assays to screen for new IL-2 receptor agonists and antagonists. In such assays, IL-2Rβγc binding compounds can be used without modification or can be modified in a variety of ways; for example, by labeling, such as covalently or non-covalently joining a moiety which directly or indirectly provides a detectable signal. In any of these assays, the materials thereto can be labeled either directly or indirectly. Possibilities for direct labeling include label groups such as: radiolabels such as ¹²⁵I, enzymes such as peroxidase and alkaline phosphatase, and fluorescent labels capable of monitoring the change in fluorescence intensity, wavelength shift, or fluorescence polarization. Possibilities for indirect labeling include biotinylation of one constituent followed by binding to avidin coupled to one of the above label groups. The compounds may also include spacers or linkers in cases where the compounds are to be attached to a solid support.

[1063] Based on their ability to bind to the IL-2R, IL-2Rβγc binding compounds provided by the present disclosure can be used as reagents for detecting IL-2R, for example, on living cells, fixed cells, in biological fluids, in tissue homogenates, in purified, and natural biological materials. For example, by labeling such peptides, one can identify cells expressing the IL-2Rβ and IL-2Rγc subunits. In addition, based on their ability to bind to IL-2R, the IL-2Rβγc binding compounds of the present disclosure can be used, for example, in in situ staining, FACS (fluorescence-activated cell sorting), Western Blotting, and ELISA. In addition, based on their ability to bind to IL-2R, IL-2Rβγc binding compounds provided by the present disclosure can be used in receptor purification, or in purifying cells expressing IL-2R on the cell surface (or inside permeabilized cells).

[1064] IL-2Rβγc binding compounds provided by the present disclosure can also be utilized as commercial reagents for various medical research and diagnostic uses. Such uses include, for example, (1) use as a calibration standard for quantitating the activities of candidate IL-2 agonists in a variety of functional assays; (2) use to maintain the proliferation and growth of IL-2-dependent cell lines; (3) use in structural analysis of IL-2R through co-crystallization; (4) use to investigate the mechanism of IL-2 signal transduction/receptor activation; and (5) other research and diagnostic applications where IL-2R is activated or such activation is conveniently calibrated against a known quantity of an IL-2R agonist.

[1065] Aspects of the present invention include nucleic acids encoding for the IL-2Rβ ligands, the IL-2Rγc ligands, the IL-2Rβγc ligands, the tandem IL-2Rβγc ligands, the IL-2Rβγc ligand constructs, and the IL-2Rβγc binding compounds provided by the present disclosure.

[1066] Nucleic acids/isolated polynucleotides encoding the IL-2Rβ ligands, IL-2Rγc ligands, and the IL-2Rβγc binding compounds provided by the present disclosure can be incorporated into expression vectors depending in part on the host cells used to produce the IL-2Rβ ligands, the IL-2Rγc ligands, and the IL-2Rβγc binding compounds. Generally, the nucleic acids can be operably linked to any number of regulatory elements such as, for example, promoters, origin of replication, selectable markers, ribosomal binding sites, and/or inducers. The expression vectors can be extra-chromosomal or integrating vectors.

[1067] The nucleic acids and/or expression can be transformed into any number of different types of host cells including mammalian, bacterial, yeast, insect and/or fungal cells, with mammalian cells such as CHO cells.

[1068] A nucleic acid encoding an IL-2Rβγc ligand can comprise a first nucleic acid sequence encoding an IL-2Rβ ligand; a second nucleic acid sequence encoding a peptidyl ligand linker; and a third nucleic acid sequence encoding an IL-2Rγc ligand.

[1069] A nucleic acid encoding an IL-2Rβγc ligand fusion protein can comprise a first nucleic acid sequence encoding the IL-2Rβγc ligand provided by the present disclosure; and a second nucleic acid sequence encoding a fusion partner. A nucleic acid encoding an IL-2Rβγc ligand fusion protein can comprise a nucleic acid encoding an IL-2Rβγc ligand and the fusion partner. A nucleic acid encoding an IL-2Rβγc ligand fusion protein can further comprise a nucleic acid segment encoding a construct linker and a nucleic acid encoding an IL-2Rβγc ligand fusion protein can comprise a nucleic acid encoding an IL-2Rβγc ligand, the fusion partner, and the construct linker.

[1070] The fusion partner can comprise, for example, HSA, an Fc-fragment, an IgG, an antibody directed to a cell-specific antigen, and an antibody directed to a cell-specific receptor.

[1071] A nucleic acid encoding an IL-2Rβγc fusion protein can further comprise a nucleic acid encoding a peptidyl linker, where the peptidyl linker is configured to bind the IL-2Rβγc ligand to the fusion partner.

[1072] A nucleic acid provided by the present disclosure can encode a fusion protein comprising an IL-2Rβγc ligand, and a linker binding the C-terminus of the IL-2Rβγc ligand to HSA.

[1073] A nucleic acid provided by the present disclosure can encode a fusion protein comprising a dimeric Fc-Fragment of IgG1, IgG2, or IgG4, an IL-2Rβγc ligand, and a linker binding the N-terminus of an IL-2Rβγc ligand to the C-terminus of one CH3 domain of the dimeric Fc-fragment.

[1074] A nucleic acid provided by the present disclosure can encode a fusion protein comprising a dimeric Fc-Fragment of IgG1, IgG2, or IgG4, two IL-2Rβγc ligands, and a linker binding the N-terminus of each of the two IL-2Rβγc ligands to the C-terminus of each CH3 domain of the dimeric Fc-fragment.

[1075] A nucleic acid provided by the present disclosure can encode a fusion protein comprising a heavy chain of an immunoglobulin molecule such as IgG1, IgG2, or IgG4, an IL-2Rβγc ligand, and a Fc linker bonding the N-terminus of the IL-2Rβγc ligand to the C-terminus of the Fc region.

[1076] A nucleic acid provided by the present disclosure can comprise a nucleic acid encoding for an IL-2Rβγc binding compound provided by the present disclosure and an RNA and/or DNA vaccine.

[1077] A nucleic acid provided by the present disclosure can comprise a nucleic acid encoding for an IL-2Rβγc binding vaccine construct. The vaccine can comprise, for example, a cancer vaccine or a viral vaccine.

[1078] A nucleic acid provided by the present disclosure can comprise a nucleic acid encoding for an IL-2Rβγc binding construct comprising a viral surface antigen.

[1079] A nucleic acid provided by the present disclosure can comprise a nucleic acid encoding for an IL-2Rβγc binding construct comprising a virus-like particle.

[1080] A nucleic acid provided by the present disclosure can encode for an IL-2Rβ ligand provided by the present disclosure, or can encode for an amino acid sequence comprising an amino acid sequence having greater than 60%, greater than 70%, greater than 80%, greater than 85%, greater than 90%, or greater than 95% sequence similarity to an IL-2Rβ ligand provided by the present disclosure.

[1081] A nucleic acid provided by the present disclosure can encode for an IL-2Rβ ligand comprising an amino acid sequence of any one of SEQ ID NOS: 612, 664, 671, 865, 856, 858, 864, 869, 870, 874, 875, and 901, or can encode for an amino acid sequence comprising an amino acid sequence having greater than 60%, greater than 70%, greater than 80%, greater than 85%, greater than 90%, or greater than 95% sequence similarity to any one of SEQ ID NOS: 612, 664, 671, 865, 856, 864, 858, 869, 870, 874, 875, and 901.

[1082] A nucleic acid provided by the present disclosure can encode for an IL-2Rγc ligand provided by the present disclosure, or can encode for an amino acid sequence comprising an amino acid sequence having greater than 60%, greater than 70%, greater than 80%, greater than 85%, greater than 90%, or greater than 95% sequence similarity to an IL-2Rγc ligand provided by the present disclosure.

[1083] A nucleic acid provided by the present disclosure can encode for an IL-2Rγc ligand comprising an amino acid sequence of any one of SEQ ID NOS: 965, 980, 981, 985, 1024, 1026, and 1028, or can encode for an amino acid sequence comprising an amino acid sequence having greater than 60%, greater than 70%, greater than 80%, greater than 85%, greater than 90%, or greater than 95% sequence similarity to any one of SEQ ID NOS: 965, 980, 981, 985, 1024, 1026, and 1028.

[1084] nucleic acid provided by the present disclosure can encode for an IL-2Rβγc ligand provided by the present disclosure, or can encode for an amino acid sequence comprising an amino acid sequence having greater than 60%, greater than 70%, greater than 80%, greater than 85%, greater than 90%, or greater than 95% sequence similarity to an IL-2Rβγc ligand provided by the present disclosure.

[1085] A nucleic acid provided by the present disclosure can encode for an IL-2Rβγc ligand comprising an amino acid sequence of any one of SEQ ID NOS: 1263-1270, or can encode for an amino acid sequence comprising an amino acid sequence having greater than 60%, greater than 70%, greater than 80%, greater than 85%, greater than 90%, or greater than 95% sequence similarity to any one of SEQ ID NOS: 1263-1270.

[1086] A nucleic acid provided by the present disclosure can encode for an IL-2Rβγc ligand fusion protein provided by the present disclosure, or can encode for an amino acid sequence comprising an amino acid sequence having greater than 60%, greater than 70%, greater than 80%, greater than 85%, greater than 90%, or greater than 95% sequence similarity to an IL-2Rβγc ligand fusion protein provided by the present disclosure.

[1087] A nucleic acid provided by the present disclosure can encode for an IL-2Rβγc ligand fusion protein comprising an amino acid sequence of any one of SEQ ID NOS: 1212-1252, or can encode for an amino acid sequence comprising an amino acid sequence having greater than 60%, greater than 70%, greater than 80%, greater than 85%, greater than 90%, or greater than 95% sequence similarity to any one of SEQ ID NOS: 1212-1252.

[1088] A nucleic acid provided by the present disclosure can encode for an IL-2Rβγc ligand construct comprising an IL-2Rβ ligand comprising an amino acid sequence of SEQ ID NO: 865 or an amino acid sequence comprising an amino acid sequence having greater than 60%, greater than 70%, greater than 80%, greater than 85%, greater than 90%, or greater than 95% sequence similarity to SEQ ID NO: 865; and an IL-2Rγc ligand comprising an amino acid sequence of SEQ ID NO: 965 or an amino acid sequence comprising an amino acid sequence having greater than 60%, greater than 70%, greater than 80%, greater than 85%, greater than 90%, or greater than 95% sequence similarity to SEQ ID NO: 965.

[1089] A nucleic acid provided by the present disclosure can encode for a tandem IL-2Rβγc ligand comprising two or more IL-2Rβγc ligands provided by the present disclosure.

[1090] Aspects of the invention include expression vectors comprising a nucleic acid encoding an IL-2Rβ ligand, an IL-2Rγc ligand, an IL-2Rβγc ligand, a tandem IL-2Rβγc ligand, or an IL-2Rβγc ligand construct provided by the present disclosure.

[1091] Aspects of the invention further include a host cell comprising an expression vector comprising a nucleic acid encoding an IL-2Rβ ligand, an IL-2Rγc ligand, an IL-2Rβγc ligand, a tandem IL-2Rβγc ligand, or an IL-2Rβγc ligand construct provided by the present disclosure.

[1092] Methods provided by the present disclosure include methods of making an IL-2Rβ ligand, an IL-2Rγc ligand, an IL-2Rβγc ligand, a tandem IL-2Rβγc ligand, or an IL-2Rβγc ligand construct provided by the present disclosure, comprising culturing a host cell, wherein the host cell comprises an expression vector comprising a nucleic acid encoding an IL-2Rβ ligand, an IL-2Rγc ligand, an IL-2Rβγc ligand, a tandem IL-2Rβγc ligand, or an IL-2Rβγc ligand construct provided by the present disclosure, under conditions where the IL-2Rβ ligand, IL-2Rγc ligand, IL-2Rβγc ligand, tandem IL-2Rβγc ligand, or IL-2Rβγc ligand construct is expressed, and recovering the expressed IL-2Rβ ligand, IL-2Rγc ligand, IL-2Rβγc ligand, tandem IL-2Rβγc ligand, or IL-2Rβγc ligand construct.

### Aspects of the Invention

[1093] The invention is further defined by the following aspects.

[1094] Aspect 1. An IL-2Rβγc ligand comprising:

[1095] (a) an IL-2Rβ ligand, wherein the IL-2Rβ ligand comprises an amino acid sequence of Formula (1) (SEQ ID NO: 805), Formula (1a) (SEQ ID NO: 806), Formula (1b) (SEQ ID NO: 807), Formula (1c) (SEQ ID NO: 808), or Formula (1d) (SEQ ID NO: 809), or an amino acid sequence having a greater than 60% sequence similarity to an amino acid sequence of Formula (1) (SEQ ID NO: 805), Formula (1a) (SEQ ID NO: 806), Formula (1b) (SEQ ID NO: 807), Formula (1c) (SEQ ID NO: 808), or Formula (1d) (SEQ ID NO: 809):

(1)
-X²¹¹-X²¹²-X²¹³-X²¹⁴-C-X²¹⁵-X²¹⁶-X²¹⁷-X²¹⁸-X²¹⁹-X²²⁰-
X²²¹-X²²²-C-X²²³-X²²⁴-X²²⁵-
(1a)
-X²¹²-X²¹³-X²¹⁴-C-X²¹⁵-X²¹⁶-X²¹⁷-X²¹⁸-X²¹⁹-X²²⁰-X²²¹-
X²²²-C-X²²³-X²²⁴-
(1b)
-X²¹³-X²¹⁴-C-X²¹⁵-X²¹⁶-X²¹⁷-X²¹⁸-X²¹⁹-X²²⁰-X²²¹-X²²²-
C-X²²³-X²²⁴-
(1c)
-X²¹⁴-C-X²¹⁵-X²¹⁶-X²¹⁷-X²¹⁸-X²¹⁹-X²²⁰-X²²¹-X²²²-C-X²²³-
(1d)
-C-X²¹⁵-X²¹⁶-X²¹⁷-X²¹⁸-X²¹⁹-X²²⁰-X²²¹-X²²²-C

[1096] wherein,
   [1097] X²¹¹ is selected from an amino acid;
   [1098] X²¹² is selected from F, H, W, and Y;
   [1099] X²¹³ is selected from F, H, I, L, M, V, W, and Y;
   [1100] X²¹⁴ is P;
   [1101] X²¹⁵ is selected from F, H, W, and Y;
   [1102] X²¹⁶ is selected from F, I, L, M, V, W, and Y;
   [1103] X²¹⁷ is A;
   [1104] X²¹⁸ is selected from K, R, H, N, Q, S, T, and Y;
   [1105] X²¹⁹ is selected from F, I, L, M, V, W, and Y;
   [1106] X²²⁰ is G;
   [1107] X²²¹ is selected from D, E, H, N, Q, S, T, and Y;
   [1108] X²²² is L;
   [1109] X²²³ is D;
   [1110] X²²⁴ is selected from F, I, L, M, V, W, and Y; and
   [1111] X²²⁵ is selected from D and E;

[1112] (b) an IL-2Rγc ligand, wherein the IL-2Rγc ligand comprises an amino acid sequence of Formula (5) (SEQ ID NO: 944), Formula (5a) (SEQ ID NO: 945), Formula (5b) (SEQ ID NO: 946), Formula (5c) (SEQ ID NO: 947), Formula (5d) (SEQ ID NO: 948), or Formula (5e) (SEQ ID NO: 949), or an amino acid sequence having a greater than 60% sequence similarity to an amino acid sequence of Formula (5) (SEQ ID NO: 944), Formula (5a) (SEQ ID NO: 945), Formula (5b) (SEQ ID NO: 946), Formula (5c) (SEQ ID NO: 947), Formula (5d) (SEQ ID NO: 948), or Formula (5e) (SEQ ID NO: 949):

(5)
-X¹⁷¹-X¹⁷²-X¹⁷³-X¹⁷⁴-X¹⁷⁵-C-X¹⁷⁶-X¹⁷⁷-X¹⁷⁸-X¹⁷⁹-X¹⁸⁰-
X¹⁸¹-X¹⁸²-X¹⁸³-C-X¹⁸⁴-X¹⁸⁵-X¹⁸⁶-X¹⁸⁷-X¹⁸⁸-
(5a)
-X¹⁷²-X¹⁷³-X¹⁷⁴-X¹⁷⁵-C-X¹⁷⁶-X¹⁷⁷-X¹⁷⁸-X¹⁷⁹-X¹⁸⁰-X¹⁸¹-
X¹⁸²-X¹⁸³-C-X¹⁸⁴-X¹⁸⁵-X¹⁸⁶-X¹⁸⁷-
(5b)
-X¹⁷³-X¹⁷⁴-X¹⁷⁵-C-X¹⁷⁶-X¹⁷⁷-X¹⁷⁸-X¹⁷⁹-X¹⁸⁰-X¹⁸¹-X¹⁸²-
X¹⁸³-C-X¹⁸⁴-X¹⁸⁵-X¹⁸⁶-
(5c)
-X¹⁷⁴-X¹⁷⁵-C-X¹⁷⁶-X¹⁷⁷-X¹⁷⁸-X¹⁷⁹-X¹⁸⁰-X¹⁸¹-X¹⁸²-X¹⁸³-
C-X¹⁸⁴-X¹⁸⁵-
(5d)
-X¹⁷⁵-C-X¹⁷⁶-X¹⁷⁷-X¹⁷⁸-X¹⁷⁹-X¹⁸⁰-X¹⁸¹-X¹⁸²-X¹⁸³-C-X¹⁸⁴-
(5e)
-C-X¹⁷⁶-X¹⁷⁷-X¹⁷⁸-X¹⁷⁹-X¹⁸⁰-X¹⁸¹-X¹⁸²-X¹⁸³-C

[1113] wherein,
   [1114] X¹⁷¹ is selected from H, K, and R;
   [1115] X¹⁷² is selected from S, T, and Y;
   [1116] X¹⁷³ is selected from D, E, F, I, L, M, V, W, and Y;
   [1117] X¹⁷⁴ is selected from F, I, L, M, V, W, and Y;
   [1118] X¹⁷⁵ is selected from D, E, F, I, L, M, V, W, and Y;
   [1119] X¹⁷⁶ is selected from D, E, H, N, Q, S, T, and Y;
   [1120] X¹⁷⁷ is selected from D and E;
   [1121] X¹⁷⁸ is selected from F, H, I, L, M, V, W, and Y;
   [1122] X¹⁷⁹ is selected from D, E, H, N, Q, S, T, and Y;
   [1123] X¹⁸⁰ is G;
   [1124] X¹⁸¹ is V;
   [1125] X¹⁸² is E;
   [1126] X¹⁸³ is L;
   [1127] X¹⁸⁴ is selected from W;
   [1128] X¹⁸⁵ is selected from F, I, L, M, V, W, Y, H, N, Q, S, and T;
   [1129] X¹⁸⁶ is E;
   [1130] X¹⁸⁷ is selected from an amino acid; and
   [1131] X¹⁸⁸ is selected from D and E; and

[1132] (c) an IL-2Rβγc ligand linker binding the IL-2Rβ ligand to the IL-2Rγc ligand.

[1133] Aspect 2. The IL-2Rβγc ligand of aspect 1, wherein in an IL-2Rβ ligand of Formula (5)-(5e):

[1134] X²¹¹ is selected from H, K, and R;

[1135] X²¹² is w;

[1136] x²¹³ is y;

[1137] x²¹⁴ is P;

[1138] X²¹⁵ is w;

[1139] X²¹⁶ is M;

[1140] X²¹⁷ is A;

[1141] X²¹⁸ is selected N and Q;

[1142] X²¹⁹ is selected from L and V;

[1143] X²²⁰ is G;

[1144] X²²¹ is selected from E, D, and Q;

[1145] X²²² is L;

[1146] X²²³ is D;

[1147] X²²⁴ is selected from L and M; and

[1148] X²²⁵ is selected from D and E.

[1149] Aspect 3. The IL-2Rβγc ligand of aspect 1, wherein in an IL-2Rβ ligand of Formula (5)-(5e):

[1150] X²¹¹ is selected from A, D, E, G, H, L, M, N, Q, R, S, T, and V;

[1151] X²¹² is selected from C, F, W, and Y;

[1152] X²¹³ is selected from F, H, K, L, N, Q, R, S, W, and Y;

[1153] X²¹⁴ is P;

[1154] X²¹⁵ is selected from W and Y;

[1155] X²¹⁶ is selected from F, I, K, L, M, R, S, T, and V;

[1156] X²¹⁷ is A;

[1157] X²¹⁸ is selected from D, E, G, H, K, L, N, Q, R, S, and Y;

[1158] X²¹⁹ is selected from L, P, and V;

[1159] X²²⁰ is selected from G, H, and W;

[1160] X²²¹ is selected from D, E, and Q;

[1161] X²²² is selected from L and M;

[1162] X²²³ is D;

[1163] X²²⁴ is selected from L, M, Q, and V; and

[1164] X²²⁵ is selected from A, D, E, F, G, H, L, N, Q, T, and V.

[1165] Aspect 4. The IL-2Rβγc ligand of aspect 1, wherein in an IL-2Rβ ligand of Formula (5)-(5e):

[1166] X²¹¹ is selected from H an R;

[1167] X²¹² is selected from F and W;

[1168] X²¹³ is selected from F, L, W, and Y;

[1169] X²¹⁴ is P;

[1170] X²¹⁵ is selected from W and Y;

[1171] X²¹⁶ is selected from F, I, L, M, and V;

[1172] X²¹⁷ is A;

[1173] X²¹⁸ is selected D, E, H, K, N, Q, and R;

[1174] X²¹⁹ is selected from L and V;

[1175] X²²⁰ is G;

[1176] X²²¹ is selected from D, E, and Q;

[1177] X²²² is selected from L and M;

[1178] X²²³ is D;

[1179] X²²⁴ is selected L, M, and V; and

[1180] X²²⁵ is selected from D and E.

[1181] Aspect 5. The IL-2Rβγc ligand of aspect 1, wherein in an IL-2Rβ ligand of Formula (5)-(5e):

[1182] X²¹¹ is selected from H and R;

[1183] X²¹² is w;

[1184] X²¹³ is Y;

[1185] X²¹⁴ is P;

[1186] X²¹⁵ is IV;

[1187] X²¹⁶ is M;

[1188] X²¹⁷ is A;

[1189] X²¹⁸ is selected from K and R;

[1190] X²¹⁹ is L;

[1191] X²²⁰ is G;

[1192] X²²¹ is selected from E and Q;

[1193] X²²² is L;

[1194] X²²³ is D;

[1195] X²²⁴ is L; and

[1196] X²²⁵ is selected from D and E.

[1197] Aspect 6. The IL-2Rβγc ligand of any one of aspects 1 to 5, wherein in an IL-2Rγc ligand of Formula (5)-(5e):

[1198] X¹⁷¹ is selected from H, K, and R;

[1199] X¹⁷² is selected from S, T, and Y;

[1200] X¹⁷³ is selected from D and E;

[1201] X¹⁷⁴ is V;

[1202] X¹⁷⁵ is selected from D and E;

[1203] X¹⁷⁶ is selected from E and Q;

[1204] X¹⁷⁷ is selected from D and E;

[1205] X¹⁷⁸ is selected from F, H, W, and Y;

[1206] X¹⁷⁹ is selected from D, E, and Q;

[1207] X¹⁸⁰ is G;

[1208] X¹⁸¹ is V;

[1209] X¹⁸² is E;

[1210] X¹⁸³ is L;

[1211] X¹⁸⁴ is w;

[1212] X¹⁸⁵ is selected from F, I, L, M, V, W, Y, H, N, Q, S, and T;

[1213] X¹⁸⁶ is E;

[1214] X¹⁸⁷ is selected from an amino acid; and

[1215] X¹⁸⁸ is selected from D and E.

[1216] Aspect 7. The IL-2Rβγc ligand of any one of aspects 1 to 5, wherein in an IL-2Rγc ligand of Formula (5)-(5e):

[1217] X¹⁷¹ is selected from H, K, and R;

[1218] X¹⁷² is selected from S, T, and Y;

[1219] X¹⁷³ is selected from F, I, L, M, V, W, and Y;

[1220] X¹⁷⁴ is V;

[1221] X¹⁷⁵ is selected from F, I, L, M, V, W, and Y;

[1222] X¹⁷⁶ is selected from E and Q;

[1223] X¹⁷⁷ is selected from D and E;

[1224] X¹⁷⁸ is selected from F, H, W, and Y;

[1225] X¹⁷⁹ is selected from D, E, and Q;

[1226] X¹⁸⁰ is G;

[1227] X¹⁸¹ is V;

[1228] X¹⁸² is E;

[1229] X¹⁸³ is L;

[1230] X¹⁸⁴ is w;

[1231] X¹⁸⁵ is selected from F, I, L, M, V, W, Y, H, N, Q, S, and T;

[1232] X¹⁸⁶ is E;

[1233] X¹⁸⁷ is selected from an amino acid; and

[1234] X¹⁸⁸ is selected from D and E.

[1235] Aspect 8. The IL-2Rβγc ligand of any one of aspects 1 to 5, wherein in an IL-2Rγc ligand of Formula (5)-(5e):

[1236] X¹⁷¹ is selected from H, K, and R;

[1237] X¹⁷² is selected from S, T, and Y;

[1238] X¹⁷³ is selected from D, E, F, I, L, M, V, W, and Y;

[1239] X¹⁷⁴ is V;

[1240] X¹⁷⁵ is selected from D, E, F, I, L, M, V, W, and Y;

[1241] X¹⁷⁶ is selected from D, E, H, N, Q, S, T, and Y;

[1242] X¹⁷⁶ is selected from E and Q;

[1243] X¹⁷⁷ is selected from D and E;

[1244] X¹⁷⁸ is W;

[1245] X¹⁷⁹ is selected from D, E, and Q;

[1246] X¹⁸⁰ is G;

[1247] X¹⁸¹ is V;

[1248] X¹⁸² is E;

[1249] X¹⁸³ is L;

[1250] X¹⁸⁴ is w;

[1251] X¹⁸⁵ is selected from F, I, L, M, V, W, Y, H, N, Q, S, and T;

[1252] X¹⁸⁶ is E;

[1253] X¹⁸⁷ is selected from an amino acid; and

[1254] X¹⁸⁸ is selected from D and E.

[1255] Aspect 9. The IL-2Rβγc ligand of aspect 1, wherein, (a) the IL-2Rβ ligand comprises an amino acid sequence of Formula (1), Formula (1a), Formula (1b), Formula (1c), or Formula (1d); and (b) the IL-2Rγc ligand comprises an amino acid sequence of Formula (5), Formula (5a), Formula (5b), Formula (5c), Formula (5d), or Formula (5e).

[1256] Aspect 10. The IL-2Rβγc ligand of aspect 1, wherein, (a) the IL-2Rβ ligand comprises an amino acid sequence having a greater than 60% sequence similarity to an amino acid sequence of Formula (1), Formula (1a), Formula (1b), Formula (1c), or Formula (1d); and (b) the IL-2Rγc ligand comprises an amino acid sequence having a greater than 60% sequence similarity to an amino acid sequence of Formula (12), Formula (5a), Formula (5b), Formula (5c), Formula (5d), or Formula (5e).

[1257] Aspect 11. The IL-2Rβγc ligand of aspect 1, wherein, the IL-2Rβ ligand comprises an amino acid sequence selected from any one of SEQ ID NOS: 805-903; and the IL-2Rγc ligand comprises an amino acid sequence selected from any one of SEQ ID NOS: 944-1028.

[1258] Aspect 12. The IL-2Rβγc ligand of aspect 1, wherein, the IL-2Rβ ligand comprises an amino acid sequence selected from any one of SEQ ID NOS: 612, 664, 865, 856, 858, 864, 869, 870, 874, 875, and 901; and the IL-2Rγc ligand comprises an amino acid sequence selected from any one of SEQ ID NOS: 965, 980, 981, 985, 1024, 1026, and 1028.

[1259] Aspect 13. The IL-2Rβγc ligand of aspect 1, wherein the IL-2Rβ ligand has greater than 60% amino acid sequence similarity to any one of SEQ ID NO: 805-903.

[1260] Aspect 14. The IL-2Rβγc ligand of aspect 1, wherein the IL-2Rγc ligand has greater than 60% amino acid sequence similarity to any one of SEQ ID NO: 944-1028.

[1261] Aspect 15. The IL-2Rβγc ligand of aspect 1, wherein, the IL-2Rβ ligand has greater than 60% amino acid sequence similarity to any one of SEQ ID NOS: 612, 664, 865, 856, 858, 864, 869, 870, 874, 875, and 901; and the IL-2Rγc ligand has greater than 60% amino acid sequence similarity to any one of SEQ ID NOS: 965, 980, 981, 985, 1024, 1026, and 1028.

[1262] Aspect 16. The IL-2Rβγc ligand of any one of aspects 1 to 15, wherein the IL-2Rβ ligand comprises a disulfide bond between the two cysteines of the IL-2Rβ ligand.

[1263] Aspect 17. The IL-2Rβγc ligand of any one of aspects 1 to 15, wherein the IL-2Rγc ligand comprises a disulfide bond between the two cysteines of the IL-2Rβγc ligand.

[1264] Aspect 18. The IL-2Rβγc ligand of any one of aspects 1 to 15, wherein the IL-2Rβγc ligand comprises a disulfide bond between a cysteine of the IL-2Rβ ligand and a cysteine of the IL-2Rγc ligand.

[1265] Aspect 19. The IL-2Rβγc ligand of any one of aspects 1 to 15, wherein each of the cysteines of the IL-2Rβ ligand are bound to a cysteine of the IL-2Rγc ligand by a disulfide bond.

[1266] Aspect 20. The IL-2Rβγc ligand of any one of aspects 1 to 19, wherein the IL-2Rβ ligand is a pH-biased IL-2Rβ ligand and/or the IL-2Rγc ligand is a pH-biased IL-2Rγc ligand.

[1267] Aspect 21. The IL-2Rβγc ligand of any one of aspects 1 to 20, wherein the IL-2Rβγc ligand is a pH-biased IL-2Rβγc ligand.

[1268] Aspect 22. The IL-2Rβγc ligand of any one of aspects 1 to 21, wherein the IL-2Rβ ligand binds to a specific binding site of the IL-2Rβ subunit, wherein IL-2, an IL-2Rβ ligand comprising an amino acid sequence of SEQ ID NO: 1044, and an IL-2Rγc ligand comprising SEQ ID NO: 224 do not compete with the IL-2Rβ ligand for binding to the specific binding site on the IL-2Rβ subunit.

[1269] Aspect 23. The IL-2Rβγc ligand of any one of aspects 1 to 22, wherein, the IL-2Rβ ligand binds to the IL-2Rβ subunit with an IC₅₀ of less than 100 μM; and the IL-2Rβ ligand binds to the IL-2Rγc subunit with an IC₅₀ of greater than 100 μM.

[1270] Aspect 24. The IL-2Rβγc ligand of any one of aspects 1 to 23, wherein the IL-2Rγc ligand binds to a specific binding site of the IL-2Rγc subunit, wherein IL-2, an IL-2Rγc ligand comprising an amino acid sequence of SEQ ID NO: 1032, and an IL-2Rβ ligand comprising SEQ ID NO: 58 do not compete with the IL-2Rγc ligand for binding to the specific binding site on the IL-2Rγc subunit.

[1271] Aspect 25. The IL-2Rβγc ligand of any one of aspects 1 to 24, wherein, the IL-2Rγc ligand binds to the IL-2Rγc subunit with an IC₅₀ of less than 100 μM; and the IL-2Rγc ligand binds to the IL-2Rβ subunit with an IC₅₀ of greater than 100 μM.

[1272] Aspect 26. The IL-2Rβγc ligand of any one of aspects 1 to 25, wherein each of the C-terminus and/or the N-terminus of the IL-2Rβ ligand independently comprises from 2 to 10 flanking amino acids.

[1273] Aspect 27. The IL-2Rβγc ligand of any one of aspects 1 to 26, wherein each of the C-terminus and/or the N-terminus of the IL-2Rβ ligand independently comprises flanking amino acids selected from -G- (SEQ ID NO: 9390), -GG- (SEQ ID NO: 9400), or -GGRR- (SEQ ID NO: 9402).

[1274] Aspect 28. The IL-2Rβγc ligand of any one of aspects 1 to 27, wherein each of the C-terminus and/or the N-terminus of the IL-2Rγc ligand independently comprises from 2 to 10 flanking amino acids.

[1275] Aspect 29. The IL-2Rβγc ligand of any one of aspects 1 to 28, wherein each of the C-terminus and/or the N-terminus of the IL-2Rγc ligand independently comprises flanking amino acids selected from -G- (SEQ ID NO: 9390), -GG- (SEQ ID NO: 9400), or -GGRR- (SEQ ID NO: 9402).

[1276] Aspect 30. The IL-2Rβγc ligand of any one of aspects 1 to 29, wherein the C-terminus of the IL-2Rβ ligand and the C-terminus of the IL-2Rγc ligand are bound to the IL-2Rβγc ligand linker.

[1277] Aspect 31. The IL-2Rβγc ligand of any one of aspects 1 to 29, wherein the C-terminus of the IL-2Rβ ligand and the N-terminus of the IL-2Rγc ligand are bound to the IL-2Rβγc ligand linker.

[1278] Aspect 32. The IL-2Rβγc ligand of any one of aspects 1 to 29, wherein the N-terminus of the IL-2Rβ ligand and the C-terminus of the IL-2Rγc ligand are bound to the IL-2Rβγc ligand linker.

[1279] Aspect 33. The IL-2Rβγc ligand of any one of aspects 1 to 29, wherein the N-terminus of the IL-2Rβ ligand and the N-terminus of the IL-2Rγc ligand are bound to the IL-2Rβγc ligand linker.

[1280] Aspect 34. The IL-2Rβγc ligand of any one of aspects 1 to 33, wherein the IL-2Rβγc ligand linker has a length from 5 Å to 200 Å.

[1281] Aspect 35. The IL-2Rβγc ligand of any one of aspects 1 to 34, wherein the IL-2Rβγc ligand linker is configured to facilitate binding of the IL-2Rβγc ligand to IL-2R.

[1282] Aspect 36. The IL-2Rβγc ligand of any one of aspects 1 to 35, wherein the IL-2Rβγc ligand linker is configured to activate IL-2R.

[1283] Aspect 37. The IL-2Rβγc ligand of any one of aspects 1 to 36, wherein the IL-2Rβγc ligand linker comprises a synthetic IL-2Rβγc ligand linker.

[1284] Aspect 38. The IL-2Rβγc ligand of any one of aspects 1 to 36, wherein the synthetic IL-2Rβγc ligand linker comprises a triazole.

[1285] Aspect 39. The IL-2Rβγc ligand of any one of aspects 1 to 36, wherein the IL-2Rβγc ligand linker comprises a peptidyl IL-2Rβγc ligand linker.

[1286] Aspect 40. The IL-2Rβγc ligand of aspect 37, wherein the peptidyl IL-2Rβγc ligand linker comprises from 2 to 20 amino acids.

[1287] Aspect 41. The IL-2Rβγc ligand of aspect 37, wherein the peptidyl IL-2Rβγc ligand linker comprises (G)ₙ (SEQ ID NO: 9380), (GS)ₙ (SEQ ID NO: 9381), (GGS)ₙ (SEQ ID NO: 9382), (GGGS). (SEQ ID NO: 9383), or (GGGGS)ₙ (SEQ ID NO: 9384), wherein n is an integer from 1 to 20.

[1288] Aspect 42. The IL-2Rβγc ligand of any one of aspects 1 to 41, wherein the IL-2Rβγc linker comprises a cleavable IL-2Rβγc ligand linker.

[1289] Aspect 43. The IL-2Rβγc ligand of aspect 1, wherein the IL-2Rβγc ligand comprises: an IL-21213 ligand comprising the amino acid sequence of SEQ ID NO: 865; and an IL-2Rγc ligand comprising an amino acid sequence of SEQ ID NO: 965.

[1290] Aspect 44. The IL-2Rβγc ligand of aspect 1, wherein the IL-2Rβγc ligand comprises: an IL-21213 ligand comprising an amino acid sequence having greater than 60% sequence similarity to SEQ ID NO: 865; and an IL-2Rγc ligand comprising an amino acid sequence having greater than 60% sequence similarity to SEQ ID NO: 965.

[1291] Aspect 45. The IL-2Rβγc ligand of aspect 44, wherein the IL-2Rβγc ligand linker comprises (G)ₙ (SEQ ID NO: 9380), (GS)ₙ (SEQ ID NO: 9381), (GGS)ₙ (SEQ ID NO: 9382). (GGGS)ₙ (SEQ ID NO: 9383), or (GGGGS)ₙ (SEQ ID NO: 9384), wherein n is an integer from 1 to 20.

[1292] Aspect 46. The IL-2Rβγc ligand of aspect 44, wherein the IL-2Rβγc ligand linker comprises -GGS- (SEQ ID NO: 9392).

[1293] Aspect 47. The IL-2Rβγc ligand of aspect 1, wherein the IL-2Rβγc ligand comprises the amino acid sequence of SEQ ID NO: 1263 or an amino acid sequence having greater that 60% sequence similarity to SEQ ID NO: 1263.

[1294] Aspect 48. The IL-2Rβγc ligand of aspect 47, wherein the IL-2Rβγc ligand comprises one or more flanking glycines.

[1295] Aspect 49. The IL-2Rβγc ligand of aspect 1, wherein the IL-2Rβγc ligand comprises the amino acid sequence of SEQ ID NO: 1264 or an amino acid sequence having greater that 60% sequence similarity to SEQ ID NO: 1264.

[1296] Aspect 50. The IL-2Rβγc ligand of aspect 49, wherein, the cysteines of the IL-2Rβ ligand are bound to each other by a disulfide bond; and the cysteines of the IL-2Rγc ligand are bound to each other by a disulfide bond.

[1297] Aspect 51. The IL-2Rβγc ligand of aspect 49, wherein the cysteines of the IL-2Rβ ligand are bound to the cysteines of the IL-2Rγc ligand.

[1298] Aspect 52. The IL-2Rβγc ligand of any one of aspects 1 to 51, wherein the IL-2Rβγc ligand is a full IL-2R agonist.

[1299] Aspect 53. The IL-2Rβγc ligand of any one of aspects 1 to 51, wherein the IL-2Rβγc ligand is a partial IL-2R agonist.

[1300] Aspect 54. The IL-2Rβγc ligand of any one of aspects 1 to 53, wherein the IL-2Rβγc ligand is a pH-biased IL-2R agonist.

[1301] Aspect 55. The IL-2Rβγc ligand of any one of aspects 1 to 51, wherein the IL-2Rβγc ligand is an IL-2R agonist for the STAT5 phosphorylation, AKT phosphorylation, and ERK1/2 phosphorylation pathways in NK-92 cells and TF-1β cells.

[1302] Aspect 56. A tandem IL-2Rβγc ligand, wherein the tandem IL-2Rβγc ligand comprises two or more of the IL-2Rβγc ligands of any one of aspects 1 to 55.

[1303] Aspect 57. The tandem IL-2Rβγc ligand of aspect 56, wherein each of the two or more IL-2Rβγc ligands is the same.

[1304] Aspect 58. The tandem IL-2Rβγc ligand of any one of aspects 56 to 57, wherein at least one of the two or more IL-2Rβγc ligands is different than another IL-2Rβγc ligand.

[1305] Aspect 59. The tandem IL-2Rβγc ligand of any one of aspects 56 to 58, wherein each of the two or more IL-2Rβγc ligands is bound to another IL-2Rβγc ligand through a tandem linker.

[1306] Aspect 60. The tandem IL-2Rβγc ligand of any one of aspects 56 to 59, wherein, the C-terminus of a first IL-2Rβγc ligand is bound to the tandem linker; and the N-terminus of a second IL-2Rβγc ligand is bound to the tandem linker.

[1307] Aspect 61. The tandem IL-2Rβγc ligand of any one of aspects 56 to 60, wherein the tandem linker comprises a peptidyl tandem linker.

[1308] Aspect 62. The tandem IL-2Rβγc ligand of aspect 61, wherein the peptidyl tandem linker comprises from 2 to 20 amino acids.

[1309] Aspect 63. The tandem IL-2Rβγc ligand of any one of aspects 61 to 62, wherein the peptidyl tandem linker has a length from 5 Å to 200 Å.

[1310] Aspect 64. An IL-2Rβγc ligand construct, wherein the IL-2Rβγc ligand construct comprises one or more of the IL-2Rβγc ligands of any one of aspects 1 to 55 bound to a construct partner.

[1311] Aspect 65. The IL-2Rβγc ligand construct of aspect 64, wherein, the IL-2Rβγc ligand construct comprises two or more IL-2Rβγc ligands; and each of the two or more IL-2Rβγc ligands is the same.

[1312] Aspect 66. The IL-2Rβγc ligand construct of aspect 64, wherein, the IL-2Rβγc ligand construct comprises two or more IL-2Rβγc ligands; and at least one of the two or more IL-2Rβγc ligands is different than at least one of the other IL-2Rβγc ligand.

[1313] Aspect 67. The IL-2Rβγc ligand construct of any one of aspects 64 to 66, further comprising a construct linker, wherein an IL-2Rβγc ligand is bound to the construct partner through the construct linker.

[1314] Aspect 68. The IL-2Rβγc ligand construct of aspect 67, wherein the IL-2Rβγc ligand is bound to the construct linker through the C-terminus of the IL-2Rβγc ligand.

[1315] Aspect 69. The IL-2Rβγc ligand construct of aspect 67, wherein the IL-2Rβγc ligand is bound to the construct linker through the N-terminus of the IL-2Rβγc ligand.

[1316] Aspect 70. The IL-2Rβγc ligand construct of any one of aspects 67 to 69, wherein the construct linker comprises a peptidyl construct linker.

[1317] Aspect 71. The IL-2Rβγc ligand construct of aspect 70, wherein the peptidyl construct linker comprises from 2 to 200 amino acids.

[1318] Aspect 72. The IL-2Rβγc ligand construct of any one of aspects 70 to 71, wherein the peptidyl construct linker has a length from 5 Å to 200 Å.

[1319] Aspect 73. The IL-2Rβγc ligand construct of aspect 70, wherein the peptidyl construct linker comprises (G)ₙ (SEQ ID NO: 9380), (GS)ₙ (SEQ ID NO: 9381), (GGS)ₙ (SEQ ID NO: 9382), (GGGS)ₙ (SEQ ID NO: 9383), (GGGGS)ₙ (SEQ ID NO: 9384), or (PA)ₙ (SEQ ID NO: 9421), wherein n is an integer from 1 to 20.

[1320] Aspect 74. The IL-2Rβγc ligand construct of as aspect 67, wherein the construct linker comprises a cleavable construct linker.

[1321] Aspect 75. The IL-2Rβγc ligand construct of any one of aspects 64 to 74, wherein, the construct partner comprises a polypeptide; and the IL-2Rβγc ligand is bound to the C-terminus and/or the N-terminus of the polypeptide.

[1322] Aspect 76. The IL-2Rβγc ligand construct of any one of aspects 64 to 74, wherein, the construct partner comprises a polypeptide; and the IL-2Rβγc ligand is bound to an amino acid side chain.

[1323] Aspect 77. The IL-2Rβγc ligand construct of any one of aspects 64 to 74, wherein, the construct partner comprises a polypeptide; and the IL-2Rβγc ligand is incorporated into the polypeptide.

[1324] Aspect 78. The IL-2Rβγc ligand construct of any one of aspects 64 to 77, wherein the construct partner comprises a compound configured to impart a desired pharmacokinetic property to the IL-2Rβγc ligand in the systemic circulation of a patient.

[1325] Aspect 79. The IL-2Rβγc ligand construct of any one of aspects 64 to 78, wherein the construct partner comprises a compound configured to impart a desired biodistribution property to the IL-2Rβγc ligand in the body of a patient.

[1326] Aspect 80. The IL-2Rβγc ligand construct of any one of aspects 64 to 79, wherein the construct partner is selected from a polymer, a polypeptide, an Fc-fragment, an immunoglobulin fragment, and an antibody.

[1327] Aspect 81. The IL-2Rβγc ligand construct of any one of aspects 64 to 79, wherein the construct partner is selected from human serum albumin, a polypeptide, and a polyethylene glycol.

[1328] Aspect 82. The IL-2Rβγc ligand construct of any one of aspects 64 to 79, wherein the IL-2Rβγc ligand construct comprises a recombinant fusion protein.

[1329] Aspect 83. The IL-2Rβγc ligand construct of any one of aspects 64 to 82, wherein the IL-2Rβγc ligand construct comprises an amino acid sequence selected from any one of SEQ ID NOS: 1212-1252 or an amino acid sequence having greater than 60% sequence similarity to any one of SEQ ID NOS: 1212-1252.

[1330] Aspect 84. The IL-2Rβγc ligand construct of any one of aspects 64 to 82, wherein the IL-2Rβγc ligand comprises the amino acid sequence of SEQ ID NO: 1263 or an amino acid sequence having greater than 60% sequence similarity to SEQ ID NO: 1263.

[1331] Aspect 85. The IL-2Rβγc ligand construct of any one of aspects 64 to 84, wherein the construct partner comprises an Fc-fragment.

[1332] Aspect 86. The IL-2Rβγc ligand construct of aspect 85, wherein the Fc-fragment is derived from IgG1, IgG2, or IgG4, or a mutant of any of the foregoing.

[1333] Aspect 87. The IL-2Rβγc ligand construct of any one of aspects 85 to 86, wherein the IL-2Rβγc ligand is bound to a C-terminus of the Fc-fragment.

[1334] Aspect 88. The IL-2Rβγc ligand construct of aspect 87, wherein the IL-2Rβγc ligand is bound to a N-terminus of the Fc-fragment.

[1335] Aspect 89. The IL-2Rβγc ligand construct of aspect 87, wherein the IL-2Rβγc ligand is bound to the Fc-fragment though an Fc-fragment linker.

[1336] Aspect 90. The IL-2Rβγc ligand construct of aspect 89, wherein the Fc-fragment linker comprises a peptidyl Fc-fragment linker.

[1337] Aspect 91. The IL-2Rβγc ligand construct of aspect 89, wherein the peptidyl Fc-fragment linker comprises from 2 to 200 amino acids.

[1338] Aspect 92. The IL-2Rβγc ligand construct of aspect 89, wherein the peptidyl Fc-fragment linker has a length from 5 Å to 200 Å.

[1339] Aspect 93. The IL-2Rβγc ligand construct of aspect 89, wherein the peptidyl Fc-fragment linker comprises (G)ₙ (SEQ ID NO: 9380), (GS)ₙ (SEQ ID NO: 9381), (GGS)ₙ (SEQ ID NO: 9382), (GGGS)ₙ (SEQ ID NO: 9383), (GGGGS)ₙ (SEQ ID NO: 9384), or (PA)ₙ (SEQ ID NO: 9421), wherein n is an integer from 1 to 20.

[1340] Aspect 94. The IL-2Rβγc ligand construct of any one of aspects 64 to 84, wherein the construct partner is an immunoglobulin fragment.

[1341] Aspect 95. The IL-2Rβγc ligand construct of aspect 94, wherein the immunoglobulin fragment is selected from an IgG1 fragment, an IgG2 fragment, and an IgG4 fragment.

[1342] Aspect 96. The IL-2Rβγc ligand construct of aspect 94, wherein the IL-2Rβγc ligand is bound to a C-terminus of the immunoglobulin fragment.

[1343] Aspect 97. The IL-2Rβγc ligand construct of aspect 94, wherein the IL-2Rβγc ligand is bound to an N-terminus of the immunoglobulin fragment.

[1344] Aspect 98. The IL-2Rβγc ligand construct of aspect 94, wherein the IL-2Rβγc ligand is bound to the immunoglobulin fragment though an immunoglobulin linker.

[1345] Aspect 99. The IL-2Rβγc ligand construct of aspect 98, wherein the immunoglobulin linker comprises a peptidyl immunoglobulin linker.

[1346] Aspect 100. The IL-2Rβγc ligand construct of aspect 99, wherein the peptidyl immunoglobulin linker comprises from 2 to 200 amino acids.

[1347] Aspect 101. The IL-2Rβγc ligand construct of aspect 99, wherein the peptidyl immunoglobulin linker has a length from 5 Å to 200 Å.

[1348] Aspect 102. The IL-2Rβγc ligand construct of aspect 99, wherein the peptidyl immunoglobulin linker comprises ((G)ₙ (SEQ ID NO: 9380), (GS)ₙ (SEQ ID NO: 9381), (GGS)ₙ (SEQ ID NO: 9382), (GGGS)ₙ (SEQ ID NO: 9383), (GGGGS)ₙ (SEQ ID NO: 9384), or (PA)ₙ (SEQ ID NO: 9421), wherein n is an integer from 1 to 20.

[1349] Aspect 103. The IL-2Rβγc ligand construct of aspect 89, wherein at least one IL-2Rβγc ligand is bound to an immunoglobulin heavy chain.

[1350] Aspect 104. The IL-2Rβγc ligand construct of aspect 89, wherein at least one IL-2Rβγc ligand is bound to an immunoglobulin light chain.

[1351] Aspect 105. The IL-2Rβγc ligand construct of any one of aspects 64 to 84, wherein the construct partner comprises an antibody.

[1352] Aspect 106. The IL-2Rβγc ligand construct of aspect 99, wherein the antibody is directed to a tumor antigen.

[1353] Aspect 107. The IL-2Rβγc ligand construct of aspect 106, wherein the tumor antigen is selected from CEA and FAP.

[1354] Aspect 108. The IL-2Rβγc ligand construct of aspect 105, wherein the antibody is directed to a checkpoint inhibitor.

[1355] Aspect 109. The IL-2Rβγc ligand construct of aspect 108, wherein the checkpoint inhibitor is PD-1.

[1356] Aspect 110. The IL-2Rβγc ligand construct of aspect 109, wherein in the PD-1 antibody is selected from cemiplimab and pembrolizumab.

[1357] Aspect 111. The IL-2Rβγc ligand construct of aspect 105, wherein the antibody is directed to a cell-specific antigen.

[1358] Aspect 112. The IL-2Rβγc ligand construct of aspect 111, wherein the cell-specific antigen is selected from CD25, NK62D, and CD8.

[1359] Aspect 113. The IL-2Rβγc ligand construct of aspect 105, wherein the antibody further comprises a cytokine.

[1360] Aspect 114. The IL-2Rβγc ligand construct of aspect 113, wherein the cytokine comprises an interleukin.

[1361] Aspect 115. The IL-2Rβγc ligand construct of any one of aspects 64 to 84, wherein the IL-2Rβγc ligand construct comprises a cell-targeting moiety.

[1362] Aspect 116. The IL-2Rβγc ligand construct of aspect 115, wherein the cell-targeting moiety comprises a tumor targeting moiety.

[1363] Aspect 117. The IL-2Rβγc ligand construct of aspect 115, wherein the cell-targeting moiety comprises an immune cell targeting moiety.

[1364] Aspect 118. The IL-2Rβγc ligand construct of any one of aspects 64 to 84, wherein the IL-2Rβγc ligand construct further comprises a ubiquitin-like modifier.

[1365] Aspect 119. The IL-2Rβγc ligand construct of any one of aspects 64 to 118, wherein the IL-2Rβγc ligand construct further comprises a therapeutically effective moiety in addition to the IL-2Rβγc ligand.

[1366] Aspect 120. The IL-2Rβγc ligand construct of any one of aspects 64 to 119, wherein the IL-2Rβγc ligand construct is a full IL-2R agonist.

[1367] Aspect 121. The IL-2Rβγc ligand construct of any one of aspects 64 to 119, wherein the IL-2Rβγc ligand construct is a partial IL-2R agonist.

[1368] Aspect 122. The IL-2Rβγc ligand construct of any one of aspects 64 to 121, wherein the IL-2Rβγc ligand construct is a pH-biased IL-2R agonist.

[1369] Aspect 123. An IL-2Rβγc ligand construct, wherein the IL-2Rβγc ligand construct comprises a construct partner, at least one IL-2Rβ ligand bound to the construct partner, and at least one IL-2Rγc ligand bound to the construct partner, wherein,

[1370] (a) the IL-2Rβ ligand comprises an amino acid sequence of Formula (11) (SEQ ID NO: 805), Formula (11a) (SEQ ID NO: 806), Formula (11b) (SEQ ID NO: 807), Formula (11c) (SEQ ID NO: 808), or Formula (11d) (SEQ ID NO: 809), or an amino acid sequence having a greater than 60% sequence similarity to an amino acid sequence of Formula (11) (SEQ ID NO: 805), Formula (11a) (SEQ ID NO: 806), Formula (11b) (SEQ ID NO: 807), Formula (11c) (SEQ ID NO: 808), or Formula (11d) (SEQ ID NO: 809):

(11)
-X²¹¹-X²¹²-X²¹³-X²¹⁴-C-X²¹⁵-X²¹⁶-X²¹⁷-X²¹⁸-X²¹⁹-X²²⁰-
X²²¹-X²²²-C-X²²³-X²²⁴-X²²⁵
(11a)
-X²¹²-X²¹³-X²¹⁴-C-X²¹⁵-X²¹⁶-X²¹⁷-X²¹⁸-X²¹⁹-X²²⁰-X²²¹-
X²²²-C-X²²³-X²²⁴-
(11b)
-X²¹³-X²¹⁴-C-X²¹⁵-X²¹⁶-X²¹⁷-X²¹⁸-X²¹⁹-X²²⁰-X²²¹-X²²²-
C-X²²³-X²²⁴-
(11c)
-X²¹⁴-C-X²¹⁵-X²¹⁶-X²¹⁷-X²¹⁸-X²¹⁹-X²²⁰-X²²¹-X²²²-C-X²²³-
(11d)
-C-X²¹⁵-X²¹⁶-X²¹⁷-X²¹⁸-X²¹⁹-X²²⁰-X²²¹-X²²²-C

[1371] wherein,
   [1372] X²¹¹ is selected from an amino acid;
   [1373] X²¹² is selected from F, H, W, and Y;
   [1374] X²¹³ is selected from F, H, I, L, M, V, W, and Y;
   [1375] X²¹⁴ is P;
   [1376] X²¹⁵ is selected from F, H, W, and Y;
   [1377] X²¹⁶ is selected from F, I, L, M, V, W, and Y;
   [1378] X²¹⁷ is A;
   [1379] X²¹⁸ is selected from K, R, H, N, Q, S, T, and Y;
   [1380] X²¹⁹ is selected from F, I, L, M, V, W, and Y;
   [1381] X²²⁰ is G;
   [1382] X²²¹ is selected from D, E, H, N, Q, S, T, and Y;
   [1383] X²²² is L;
   [1384] X²²³ is D;
   [1385] X²²⁴ is selected from F, I, L, M, V, W, and Y; and
   [1386] X²²⁵ is selected from D and E; and

[1387] (b) the IL-2Rγc ligand comprises an amino acid sequence of Formula (5) (SEQ ID NO: 944), Formula (5a) (SEQ ID NO: 945), Formula (5b) (SEQ ID NO: 946), Formula (5c) (SEQ ID NO: 947), Formula (5d) (SEQ ID NO: 948), or Formula (5e) (SEQ ID NO: 1949), or an amino acid sequence having a greater than 60% sequence similarity to an amino acid sequence of Formula (5) (SEQ ID NO: 944), Formula (5a) (SEQ ID NO: 945), Formula (5b) (SEQ ID NO: 946), Formula (5c) (SEQ ID NO: 947), Formula (5d) (SEQ ID NO: 948), or Formula (5e) (SEQ ID NO: 949):

(5)
-X¹⁷¹-X¹⁷²-X¹⁷³-X¹⁷⁴-X¹⁷⁵-C-X¹⁷⁶-X¹⁷⁷-X¹⁷⁸-X¹⁷⁹-X¹⁸⁰-
X¹⁸¹-X¹⁸²-X¹⁸³-C-X¹⁸⁴-X¹⁸⁵-X¹⁸⁶-X¹⁸⁷-X¹⁸⁸-
(5a)
-X¹⁷²-X¹⁷³-X¹⁷⁴-X¹⁷⁵-C-X¹⁷⁶-X¹⁷⁷-X¹⁷⁸-X¹⁷⁹-X¹⁸⁰-X¹⁸¹-
X¹⁸²-X¹⁸³-C-X¹⁸⁴-X¹⁸⁵-X¹⁸⁶-X¹⁸⁷-
(5b)
-X¹⁷³-X¹⁷⁴-X¹⁷⁵-C-X¹⁷⁶-X¹⁷⁷-X¹⁷⁸-X¹⁷⁹-X¹⁸⁰-X¹⁸¹-X¹⁸²-
X¹⁸³-C-X¹⁸⁴-X¹⁸⁵-X¹⁸⁶-
(5c)
-X¹⁷⁴-X¹⁷⁵-C-X¹⁷⁶-X¹⁷⁷-X¹⁷⁸-X¹⁷⁹-X¹⁸⁰-X¹⁸¹-X¹⁸²-X¹⁸³-
C-X¹⁸⁴-X¹⁸⁵-
(5d)
-X¹⁷⁵-C-X¹⁷⁶-X¹⁷⁷-X¹⁷⁸-X¹⁷⁹-X¹⁸⁰-X¹⁸¹-X¹⁸²-X¹⁸³-C-X¹⁸⁴-
(5e)
-C-X¹⁷⁶-X¹⁷⁷-X¹⁷⁸-X¹⁷⁹-X¹⁸⁰-X¹⁸¹-X¹⁸²-X¹⁸³-C-

[1388] wherein,
   [1389] X¹⁷¹ is selected from H, K, and R;
   [1390] X¹⁷² is selected from S, T, and Y;
   [1391] X¹⁷³ is selected from D, E, F, I, L, M, V, W, and Y;
   [1392] X¹⁷⁴ is selected from F, I, L, M, V, W, and Y;
   [1393] X¹⁷⁵ is selected from D, E, F, I, L, M, V, W, and Y;
   [1394] X¹⁷⁶ is selected from D, E, H, N, Q, S, T, and Y;
   [1395] X¹⁷⁷ is selected from D and E;
   [1396] X¹⁷⁸ is selected from F, H, I, L, M, V, W, and Y;
   [1397] X¹⁷⁹ is selected from D, E, H, N, Q, S, T, and Y;
   [1398] X¹⁸⁰ is G;
   [1399] X¹⁸¹ is V;
   [1400] X¹⁸² is E;
   [1401] X¹⁸³ is L;
   [1402] X¹⁸⁴ is selected from W;
   [1403] X¹⁸⁵ is selected from F, I, L, M, V, W, Y, H, N, Q, S, and T;
   [1404] X¹⁸⁶ is E;
   [1405] X¹⁸⁷ is selected from an amino acid; and
   [1406] X¹⁸⁸ is selected from D and E.

[1407] Aspect 124. The IL-2Rβγc ligand of aspect 123, wherein, the IL-2Rβ ligand comprises the amino acid sequence of SEQ ID NO: 865, or an amino acid sequence having a greater than 60% sequence similarity to SEQ ID NO: 865; and the IL-2Rγc ligand comprises the amino acid sequence of SEQ ID NO: 965, or an amino acid sequence having a greater than 60% sequence similarity to SEQ ID NO: 965.

[1408] Aspect 125. The IL-2Rβγc ligand of any one of aspects 123 to 124, wherein, the cysteines of the IL-2Rβ ligand are bound to each other by a disulfide bond; and the cysteines of the IL-2Rγc ligand are bound to each other by a disulfide bond.

[1409] Aspect 126. The IL-2Rβγc ligand construct of any one of aspects 123 to 125, wherein each of the at least one IL-2Rβ ligands and each of the at least one IL-2Rγc ligands are bound to the construct partner through a construct linker.

[1410] Aspect 127. The IL-2Rβγc ligand construct of any one of aspects 123 to 126, wherein each of the at least one IL-2Rβ ligands is the same, and each of the at least one IL-2Rγc ligands is the same.

[1411] Aspect 128. The IL-2Rβγc ligand construct of any one of aspects 123 to 127, wherein at least one of the IL-2Rβ ligands is different than at least one of the other IL-2Rβ ligands and/or at least one of the IL-2Rγc ligands is different than at least one of the other IL-2Rγc ligands.

[1412] Aspect 129. The IL-2Rβγc ligand construct of any one of aspects 123 to 128, wherein the construct partner comprises an Fc fragment, an immunoglobulin fragment, or an immunoglobulin.

[1413] Aspect 130. The IL-2Rβγc ligand construct of any one of aspects 123 to 128, wherein the construct partner comprises a polypeptide or a polymer.

[1414] Aspect 131. The IL-2Rβγc ligand construct of any one of aspects 123 to 130, further comprising at least one IL-2Rβγc ligand.

[1415] Aspect 132. A method of treating cancer in a patient comprising administering to a patient in need of such treatment a therapeutically effective amount of the IL-2Rβγc ligand of any one of aspects 1 to 155, the tandem IL-2Rβγc ligand of any one of aspects 56 to 63, the IL-2Rβγc ligand construct of any one of aspects 64 to 122, the IL-2Rβγc ligand construct of any one of aspects 123 to 131, or a combination of any of the foregoing.

[1416] Aspect 133. A method of treating an autoimmune disease in a patient comprising administering to a patient in need of such treatment a therapeutically effective amount of the IL-2Rβγc ligand of any one of aspects 1 to 155, the tandem IL-2Rβγc ligand of any one of aspects 56 to 63, the IL-2Rβγc ligand construct of any one of aspects 64 to 122, the IL-2Rβγc ligand construct of any one of aspects 123 to 131, or a combination of any of the foregoing.

[1417] Aspect 134. A method of treating an inflammatory disease in a patient comprising administering to a patient in need of such treatment a therapeutically effective amount of the IL-2Rβγc ligand of any one of aspects 1 to 155, the tandem IL-2Rβγc ligand of any one of aspects 56 to 63, the IL-2Rβγc ligand construct of any one of aspects 64 to 122, the IL-2Rβγc ligand construct of any one of aspects 123 to 131, or a combination of any of the foregoing.

[1418] Aspect 135. A method of expanding immune cells comprising contacting a population of immune cells ex vivo or in vivo with an effective amount of the IL-2Rβγc ligand of any one of aspects 1 to 155, the tandem IL-2Rβγc ligand of any one of aspects 56 to 63, the IL-2Rβγc ligand construct of any one of aspects 64 to 122, the IL-2Rβγc ligand construct of any one of aspects 123 to 131, or a combination of any of the foregoing.

[1419] Aspect 136. A method of cell therapy comprising engineering a cell to express the IL-2Rβγc ligand of any one of aspects 1 to 155 or the tandem IL-2Rβγc ligand of any one of aspects 56 to 63, such that the IL-2Rβγc ligand or tandem IL-2Rβγc ligand is express on the cell surface and/or secreted by the cell.

[1420] Aspect 137. A method of boosting a vaccine comprising administering to a patient a vaccine and a therapeutically effective amount of the IL-2Rβγc ligand of any one of aspects 1 to 155, the tandem IL-2Rβγc ligand of any one of aspects 56 to 63, the IL-2Rβγc ligand construct of any one of aspects 64 to 122, the IL-2Rβγc ligand construct of any one of aspects 123 to 131, or a combination of any of the foregoing.

[1421] Aspect 138. A method of modifying the immune response comprising administering to a patient an effective amount of the IL-2Rβγc ligand of any one of aspects 1 to 155, the tandem IL-2Rβγc ligand of any one of aspects 56 to 63, the IL-2Rβγc ligand construct of any one of aspects 64 to 122, the IL-2Rβγc ligand construct of any one of aspects 123 to 131, or a combination of any of the foregoing.

[1422] Aspect 139. A pharmaceutical composition comprising the IL-2Rβγc ligand of any one of aspects 1 to 155, the tandem IL-2Rβγc ligand of any one of aspects 56 to 63, the IL-2Rβγc ligand construct of any one of aspects 64 to 122, the IL-2Rβγc ligand construct of any one of aspects 123 to 131, or a combination of any of the foregoing.

[1423] Aspect 140. The pharmaceutical composition of aspect 139, further comprising a chemotherapeutic agent, an immunomodulator, a checkpoint inhibitor, a vaccine, or a combination of any of the foregoing.

[1424] Aspect 141. A nucleic acid encoding for the IL-2Rβγc ligand of any one of aspects 1 to 155, the tandem IL-2Rβγc ligand of any one of aspects 56 to 63, the IL-2Rβγc ligand construct of any one of aspects 64 to 122, and/or the IL-2Rβγc ligand construct of any one of aspects 123 to 131.

[1425] Aspect 142. A nucleic acid encoding for an IL-2Rβ ligand, wherein the IL-2Rβ ligand comprises an amino acid sequence selected from of any one of SEQ ID NOS: 805-903, or an amino acid sequence having greater than 60% amino acid sequence similarity to any one of SEQ ID NOS: 805-903.

[1426] Aspect 143. A nucleic acid encoding for an IL-2Rβ ligand, wherein the IL-2Rβ ligand comprises an amino acid sequence selected from any one of SEQ ID NOS: 612, 664, 865, 856, 858, 864, 869, 870, 874, 875, and 901, or an amino acid sequence having greater than 60% amino acid sequence similarity to any one of SEQ ID NOS: 612, 664, 865, 856, 858, 864, 869, 870, 874, 875, and 901.

[1427] Aspect 144. A nucleic acid encoding for the IL-2Rγc ligand, wherein the IL-2Rγc ligand comprises an amino acid sequence selected from any one of SEQ ID NOS: 944-1028, or an amino acid sequence having greater than 60% amino acid sequence similarity to any one of SEQ ID NOS: 944-1028.

[1428] Aspect 145. A nucleic acid encoding for the IL-2Rγc ligand, wherein the IL-2Rγc ligand comprises an amino acid sequence selected from any one of SEQ ID NOS: 965, 980, 981, 985, 1024, and 1026, or an amino acid sequence having greater than 60% amino acid sequence similarity to any one of SEQ ID NOS: 965, 980, 981, 985, 1024, 1026, and 1028.

[1429] Aspect 146. A nucleic acid encoding for the IL-2Rβγc ligand of any one of aspects 1 to 155.

[1430] Aspect 147. The nucleic acid of aspect 146, wherein the IL-2Rβγc ligand comprises: an IL-2Rβ ligand comprising the amino acid sequence of SEQ ID NO: 865, or an amino acid sequence having greater than 60% amino acid sequence similarity to SEQ ID NO: 865; and an IL-2Rγc ligand comprising the amino acid sequence of SEQ ID NO: 965, or an amino acid sequence having greater than 60% amino acid sequence similarity to SEQ ID NO: 865.

[1431] Aspect 148. The nucleic acid of aspect 146, wherein the IL-2Rβγc ligand comprises an amino acid sequence comprising SEQ ID NO: 1205, or an amino acid sequence having greater than 60% amino acid sequence similarity to SEQ ID NO: 1205.

[1432] Aspect 149. A nucleic acid encoding for the tandem IL-2Rβγc ligand of any one of aspects 56 to 63, wherein, each of the IL-2Rβγc ligand linkers independently comprises a peptidyl IL-2Rβγc ligand linker; and each of the tandem linkers independently comprises a peptidyl tandem linker.

[1433] Aspect 150. A nucleic acid encoding for the IL-2Rβγc ligand construct of any one of aspects 64 to 122, wherein the construct linker comprises a peptidyl construct linker.

[1434] Aspect 151. A nucleic acid encoding for the IL-2Rβγc ligand construct of aspect 150, wherein the IL-2Rβγc ligand construct comprises an amino acid sequence having greater than 60% amino acid sequence similarity to any one of SEQ ID NOS: 1202-1252.

[1435] Aspect 152. A nucleic acid encoding for the IL-2Rβγc ligand construct, wherein the IL-2Rβγc ligand construct comprises an amino acid sequence selected from of any one of SEQ ID NOS: 1202-1252.

[1436] Aspect 153. A nucleic acid encoding for the IL-2Rβγc ligand construct of any one of aspects 123 to 131.

[1437] Aspect 1A. An IL-2Rβ ligand, wherein the IL-2Rβ ligand comprises an amino acid sequence of any one of Formula (1)-(1d), Formula (2)-(2d), Formula (3)-(3e), and Formula (4)-(4f), a truncated amino acid sequence of any of the foregoing, a substituted amino acid sequence of any of the foregoing, any of the foregoing amino acid sequences having flanking amino acids, and an amino acid sequence having greater than 60% sequence similarity to any of the foregoing.

[1438] Aspect 2A. An IL-2Rβ ligand, wherein the IL-2Rβ ligand comprises an amino acid sequence of any one of SEQ ID NOS: 805-903, 911-930, 2575-2655, 2661-2891, 2900-2926, 2929-2941, 3100-3128, 3130-3151, and 3147-3186, a truncated amino acid sequence of any of the foregoing, a substituted amino acid sequence of any of the foregoing, any of the foregoing amino acid sequences having flanking amino acids, and an amino acid sequence having greater than 60% sequence similarity to any of the foregoing.

[1439] Aspect 3A. An IL-2Rβ ligand, wherein the IL-2Rβ ligand comprises an amino acid sequence of any one of Formula (1)-(1d), Formula (2)-(2d), Formula (3)-(3e), or Formula (4)-(4f).

[1440] Aspect 4A. An IL-2Rβ ligand, wherein the IL-2Rβ ligand comprises an amino acid sequence of any one of SEQ ID NOS: 805-903, 911-930, 2575-2655, 2661-2891, 2900-2926, 2929-2941, 3100-3128, 3130-3151, or 3147-3186.

[1441] Aspect 5A. An IL-2Rβ ligand, wherein the IL-2Rβ ligand comprises an amino acid sequence of SEQ ID NO: 865, a truncated amino acid sequence thereof, a substituted amino acid sequence of any of the foregoing, any of the foregoing amino acid sequences having flanking amino acids, and an amino acid sequence having greater than 60% sequence similarity to any of the foregoing.

[1442] Aspect 6A. The IL-2Rβ ligand of any one of aspects 1A to 5A, wherein the IL-2Rβ ligand comprises a disulfide bond between the two cysteines of the IL-2Rβ ligand.

[1443] Aspect 7A. The IL-2Rβ ligand of any one of aspects 1A to 6A, wherein the IL-2Rβ ligand binds to the specific binding site of the IL-2Rβ subunit with an IC50 less than 100 μM as determined using phage ELISA competition assays.

[1444] Aspect 8A. The IL-2Rβ ligand of any one of aspects 1A to 7A, wherein the IL-2Rβ ligand exhibits an EC50 for STAT5 phosphorylation in TF-1β cells and/or NK-92 cells of less than 100 μM.

[1445] Aspect 9A. The IL-2Rβ ligand of any one of aspects 1A to 8A, wherein the IL-2Rβ ligand binds to the hIL-2Rβ subunit with an IC50 less than 100 μM as determined using phage ELISA competition assays.

[1446] Aspect 10A. The IL-2Rβ ligand of any one of aspects 1A to 9A, wherein the IL-2Rβ ligand binds to the cyno-IL-2Rβ subunit with an IC50 less than 100 μM as determined using phage ELISA competition assays.

[1447] Aspect 11A. An IL-2Rγc ligand, wherein the IL-2Rγc ligand comprises an amino acid sequence of any one of Formula (5)-(5e); a truncated amino acid sequence of any of the foregoing, a substituted amino acid sequence of any of the foregoing, any of the foregoing amino acid sequences having flanking amino acids, and an amino acid sequence having greater than 60% sequence similarity to any of the foregoing.

[1448] Aspect 12A. An IL-2Rγc ligand, wherein the IL-2Rγc ligand comprises an amino acid sequence of any one of SEQ ID NOS: 944-1028, 1032-1060, and 1601-1613; a truncated amino acid sequence of any of the foregoing, a substituted amino acid sequence of any of the foregoing, any of the foregoing amino acid sequences having flanking amino acids, and an amino acid sequence having greater than 60% sequence similarity to any of the foregoing.

[1449] Aspect 13A An IL-2Rγc ligand, wherein the IL-2Rγc ligand comprises an amino acid sequence of any one of Formula (5)-(5e).

[1450] Aspect 14A. An IL-2Rγc ligand, wherein the IL-2Rγc ligand comprises an amino acid sequence of any one of SEQ ID NOS: 944-1028, 1032-1060, and 1601-1613.

[1451] Aspect 15A. An IL-2Rγc ligand, wherein the IL-2Rγc ligand comprises an amino acid sequence of SEQ ID NO: 965, a truncated amino acid sequence thereof, a substituted amino acid sequence of any of the foregoing, any of the foregoing amino acid sequences having flanking amino acids, and an amino acid sequence having greater than 60% sequence similarity to any of the foregoing.

[1452] Aspect 16A. The IL-2Rγc ligand of any one of aspects 11A to 15A, wherein the IL-2Rγc ligand comprises a disulfide bond between the two cysteines of the IL-2Rγc ligand.

[1453] Aspect 17A. The IL-2Rγc ligand of any one of aspects 11A to 16A, wherein the IL-2Rγc ligand binds to the specific binding site of the IL-2Rγc subunit with an IC50 less than 100 μM as determined using phage ELISA competition assays.

[1454] Aspect 18A. The IL-2Rγc ligand of any one of aspects 11A to 17A, wherein the IL-2Rγc ligand exhibits an EC50 for STAT5 phosphorylation in TF-1β cells and/or NK-92 cells of less than 100 μM.

[1455] Aspect 19A. The IL-2Rγc ligand of any one of aspects 11A to 18A, wherein the IL-2Rγc ligand binds to the hu-IL-2Rγc subunit with an IC50 less than 100 μM as determined using phage ELISA competition assays.

[1456] Aspect 20A. The IL-2Rγc ligand of any one of aspects 11A to 19A, wherein the IL-2Rγc ligand binds to the cyno-IL-2Rγc subunit with an IC50 less than 100 μM as determined using phage ELISA competition assays.

[1457] Aspect 21A. An IL-2Rβγc binding compound wherein the IL-2Rβγc binding compound comprises: the IL-2Rβ ligand of any one of aspects 1A to 10A; and the IL-2Rγc ligand of any one of aspects 11A to 20A.

[1458] Aspect 22A. The IL-2Rβγc binding compound of aspect 21A, wherein the IL-2Rβγc binding compound comprises an IL-2Rβγc ligand, wherein the 2Rβγc ligand comprises: a ligand linker; the IL-2Rβ ligand bound to the ligand linker; and the IL-2Rγc ligand bound to the ligand linker.

[1459] Aspect 23A. The IL-2Rβγc binding compound of aspect 22A, wherein the IL-2Rβγc ligand comprises a disulfide bond between two cysteines of the IL-2Rβγc ligand.

[1460] Aspect 24A. The IL-2Rβγc binding compound of any one of aspects 21A to 22A, wherein the IL-2Rβ ligand and the IL-2Rγc ligand are bonded to the ligand linker in an C/C orientation, an C/N orientation, an N/C orientation, or an N/N orientation.

[1461] Aspect 25A. The IL-2Rβγc binding compound of any one of aspects 21A to 24A, wherein the ligand linker comprises a peptidyl ligand linker.

[1462] Aspect 26A. The IL-2Rβγc binding compound of any one of aspects 21A to 24A, wherein the ligand linker comprises a chemical ligand linker.

[1463] Aspect 27A. The IL-2Rβγc binding compound of any one of aspects 21A to 24A, wherein the ligand linker comprises (G)ₙ (SEQ ID NO: 9380), (GS)ₙ (SEQ ID NO: 9381), (GGS)ₙ (SEQ ID NO: 9382). (GGGS)ₙ (SEQ ID NO: 9383), or (GGGGS)ₙ (SEQ ID NO: 9384), wherein n is an integer from 1 to 20.

[1464] Aspect 28.A The IL-2Rβγc binding compound of any one of aspects 21A to 24A, wherein the IL-2Rβγc ligand comprises an amino acid sequence of any one of SEQ ID NOS: 1263-1270, 4070-4085, and 4090 to 4099, a truncated amino acid sequence of any of the foregoing, a substituted amino acid sequence of any of the foregoing, any of the foregoing amino acid sequences having flanking amino acids, and an amino acid sequence having greater than 60% sequence similarity to any of the foregoing.

[1465] Aspect 29A. The IL-2Rβγc binding compound of any one of aspects 21A to 24A, wherein the IL-2Rβγc ligand comprises an amino acid sequence of any one of SEQ ID NOS: 1263-1270, 4070-4085, and 4090 to 4099.

[1466] Aspect 30A. The IL-2Rβγc binding compound of any one of aspects 21A to 29A, wherein the IL-2Rβγc ligand is a full IL-2R agonist or a partial IL-2R agonist.

[1467] Aspect 31A. The IL-2Rβγc binding compound of any one of aspects 21A to 30A, wherein the IL-2Rβγc ligand exhibits an EC50 for STAT5 phosphorylation in TF-1β cells and/or NK-92 cells of less than 100 μM.

[1468] Aspect 32A. The IL-2Rβγc binding compound of any one of aspects 21A to 31A, wherein the IL-2Rβγc ligand binds to hu-IL-2R with an IC50 less than 100 μM as determined using phage ELISA competition assays.

[1469] Aspect 33A. The IL-2Rβγc binding compound of any one of aspects 21A to 32A, wherein the IL-2Rβγc ligand binds to cyno-IL-2R with an IC50 less than 100 μM as determined using phage ELISA competition assays.

[1470] Aspect 34A. The IL-2Rβγc binding compound of aspect 21A, wherein the IL-2Rβγc binding compound comprises a construct partner, wherein the IL-2Rβ ligand and the IL-2Rγc ligand are bound to the construct partner.

[1471] Aspect 35A. The IL-2Rβγc binding compound of any one of aspects 22A to 33A, wherein the IL-2Rβγc binding compound comprises the IL-2Rβγc ligand, and the IL-2Rβγc ligand is bound to the construct partner.

[1472] Aspect 36A. The IL-2Rβγc binding compound of aspect 35A, wherein the IL-2Rβγc ligand is bonded to the construct partner through the C-terminus or through the N-terminus of the IL-2Rβγc ligand.

[1473] Aspect 37A. The IL-2Rβγc binding compound of any one of aspects 35A to 36A, wherein in the IL-2Rβγc ligand is bound to the construct partner through a construct linker.

[1474] Aspect 38A. The IL-2Rβγc binding compound of aspect 37A, wherein the construct linker comprises a peptidyl ligand linker.

[1475] Aspect 39A. The IL-2Rβγc binding compound of aspect 37A, wherein the construct linker comprises a chemical ligand linker.

[1476] Aspect 40A. The IL-2Rβγc binding compound of aspect 37A, wherein the construct linker comprises (G)ₙ (SEQ ID NO: 9380), (GS)ₙ (SEQ ID NO: 9381), (GGS)ₙ (SEQ ID NO: 9382). (GGGS)ₙ (SEQ ID NO: 9383), or (GGGGS)ₙ (SEQ ID NO: 9384), wherein n is an integer from 1 to 20.

[1477] Aspect 41A. The IL-2Rβγc binding compound of any one of aspects 34A to 40A, wherein the construct partner is selected from a polymer, a polypeptide, an Fc-fragment, an immunoglobulin fragment, and an antibody.

[1478] Aspect 42A. The IL-2Rβγc binding compound of any one of aspects 34A to 40A, wherein the construct partner is selected from human serum albumin, a polypeptide, and a polyethylene glycol.

[1479] Aspect 43A. The IL-2Rβγc binding compound of any one of aspects 34A to 40A, wherein the construct partner comprises a viral surface antigen or a virus-like particle.

[1480] Aspect 44A. The IL-2Rβγc binding compound of any one of aspects 34A to 40A, wherein the construct partner comprises a cytokine.

[1481] Aspect 45A. The IL-2Rβγc binding compound of any one of aspects 34A to 40A, wherein the compound comprises a recombinant fusion protein.

[1482] Aspect 46A. The IL-2Rβγc binding compound of aspect 45A, wherein the recombinant fusion protein is selected from a hIgG-Fc recombinant fusion protein and a hIgG1-Fc recombinant fusion protein.

[1483] Aspect 47A. The IL-2Rβγc binding compound of any one of aspects 34A to 40A, wherein the construct partner comprises an antibody and the antibody is directed to a tumor antigen.

[1484] Aspect 48A. The IL-2Rβγc binding compound of any one of aspects 34A to 40A, wherein the construct partner comprises a cell-targeting moiety.

[1485] Aspect 49A. The IL-2Rβγc binding compound of aspect 48A, wherein cell-targeting moiety comprises a tumor-targeting moiety, an immune cell-targeting moiety, or a combination thereof.

[1486] Aspect 50A. The IL-2Rβγc binding compound of aspect 35A, wherein the IL-2Rβγc binding compound comprises an amino acid sequence of any one of SEQ ID NOS: 1212-1252 and 8061-8082, a truncated amino acid sequence of any of the foregoing, a substituted amino acid sequence of any of the foregoing, any of the foregoing amino acid sequences having flanking amino acids, and an amino acid sequence having greater than 60% sequence similarity to any of the foregoing.

[1487] Aspect 51A. The IL-2Rβγc binding compound of any one of aspects 34A to 50A, wherein the IL-2Rβγc binding compound is a full IL-2R agonist or a partial IL-2R agonist.

[1488] Aspect 52A. The IL-2Rβγc binding compound of any one of aspects 34A to 51A, wherein the IL-2Rβγc binding compound exhibits an EC₅₀ for STAT5 phosphorylation in TF-1β cells and/or NK-92 cells of less than 100 μM.

[1489] Aspect 53A. The IL-2Rβγc binding compound of any one of aspects 34A to 52A, wherein the IL-2Rβγc binding compound binds to hu-IL-2R with an IC50 less than 100 μM as determined using phage ELISA competition assays.

[1490] Aspect 54A. The IL-2Rβγc binding compound of any one of aspects 34A to 53A, wherein the IL-2Rβγc binding compound binds to cyno-IL-2R with an IC50 less than 100 μM as determined using phage ELISA competition assays.

[1491] Aspect 55A. A pharmaceutical composition comprising the IL-2Rβγc binding compound of any one of aspects 21A to 54A.

[1492] Aspect 56A. The pharmaceutical composition of aspect 55A, further comprising a chemotherapeutic agent, an immunomodulator, a checkpoint inhibitor, a vaccine, or a combination of any of the foregoing.

[1493] Aspect 57A. A method of treating a disease in a patient comprising administering to a patient in need of such treatment a therapeutically effective amount of the IL-2Rβγc binding compound of any one of aspects 21A to 54A, or the pharmaceutical composition of any one of aspects 55A to 56A.

[1494] Aspect 58A. The method of aspect 57A, wherein the disease is selected from cancer, an autoimmune disease, an inflammatory disease, an infectious disease, and a viral disease.

[1495] Aspect 59A. A method of expanding immune cells comprising contacting a population of immune cells ex vivo or in vivo with an effective amount of the IL-2Rβ ligand of any one of aspects 1A to 10A, the IL-2Rγc ligand of any one of aspects 11A to 20A, or the IL-2Rβγc binding compound of any one of aspects 21A to 54A.

[1496] Aspect 60A. A method of cell therapy comprising engineering a cell to express the IL-2Rβγc binding compound of any one of aspects 21A to 54A.

[1497] Aspect 61A. A method of boosting a vaccine comprising administering to a patient a vaccine and a therapeutically effective amount of the IL-2Rβγc binding compound of any one of aspects 21A to 54A, or the pharmaceutical composition of any one of aspects 55A to 56A.

[1498] Aspect 62A. A method of modifying the immune response comprising administering to a patient an effective amount of the IL-2Rβγc binding compound of any one of aspects 21A to 54A, or the pharmaceutical composition of any one of aspects 55A to 56A.

[1499] Aspect 63A. A nucleic acid encoding for the IL-2Rβ ligand of any one of aspects 1A to 10A, the IL-2Rγc ligand of any one of aspects 11A to 21A, or the IL-2Rβγc binding compound of any one of aspects 22A to 54A.

[1500] Aspect 1B. An IL-2Rβ ligand selected from:

[1501] an amino acid sequence of any one of any one of SEQ ID NOS: 2661-2891, 2900-2926, 911-930, 9301, 9308, 2859, 2934, 3100-3128, 3130-3151, 3160-3166, 3170-3186, and 3200-3207;

[1502] a truncated amino acid sequence of any of SEQ ID NOS: 2661-2891, 2900-2926, 911-930, 9301, 9308, 2859, 2934, 3100-3128, 3130-3151, 3160-3166, 3170-3186, and 3200-3207;

[1503] an amino acid sequence of any one of SEQ ID NOS: 2661-2891, 2900-2926, 911-930, 9301, 9308, 2859, 2934, 3100-3128, 3130-3151, 3160-3166, 3170-3186, and 3200-3207; having from 1 to 4 amino acid substitutions,

[1504] an amino acid sequence of any one of SEQ ID NOS: 2661-2891, 2900-2926, 911-930, 9301, 9308, 2859, 2934, 3100-3128, 3130-3151, 3160-3166, 3170-3186, and 3200-3207 having from 1 to 4 flanking glycines (SEQ ID NO: 9429);

[1505] an amino acid sequence having greater than 60% sequence similarity to any one of SEQ ID NOS: 2661-2891, 2900-2926, 911-930, 9301, 9308, 2859, 2934, 3100-3128, 3130-3151, 3160-3166, 3170-3186, and 3200-3207;

[1506] or a combination of any of the foregoing,

[1507] wherein the IL-2Rβ ligand binds to the hu-IL-2Rβ subunit with an IC50 less than 100 μM as determined using a phage ELISA competition assay.

[1508] Aspect 2B. The IL-2Rβ ligand of aspect 1B, wherein the IL-2Rβ ligand comprises an amino acid sequence of any one of SEQ ID NOS: 2859, 2934, 3100-3128, 3130-3151, 3160-3166, 3170-3186, and 3200-3207.

[1509] Aspect 3B. The IL-2Rβ ligand of aspect 1B, wherein the IL-2Rβ ligand has a greater than 60% amino acid sequence similarity to the IL-2Rβ ligand having any one of SEQ ID NOS: 2859, 2934, 3100-3128, 3130-3151, 3160-3166, 3170-3186, and 3200-3207

[1510] Aspect 4B. The IL-2Rβ ligand of any one of aspects 1B to 3B, wherein the IL-2Rβ ligand binds to hu-IL-2R with an IC50 less than 100 μM as determined using a phage ELISA competition assay.

[1511] Aspect 5B. The IL-2Rβ ligand of any one of aspects 1B to 4B, wherein the IL-2Rβ ligand binds to the cyno-IL-2Rβ subunit with an IC50 less than 100 μM as determined using a phage ELISA competition assay.

[1512] Aspect 6B. The IL-2Rβ ligand of any one of aspects 1B to 5B, wherein the IL-2Rβ ligand binds to cyno-IL-2R with an IC50 less than 100 μM as determined using a phage ELISA competition assay.

[1513] Aspect 7B. The IL-2Rβ ligand of aspect 1B, wherein the IL-2Rβ ligand has an amino acid sequence selected from SEQ ID NO: 2858 and SEQ ID NO: 2859.

[1514] Aspect 8B. The IL-2Rβ ligand of aspect 1B, wherein the IL-2Rβ ligand has an amino acid sequence having greater than 60% sequence similarity to an amino acid sequence selected from SEQ ID NO: 2858 and SEQ ID NO: 2859.

[1515] Aspect 9B. The IL-2Rβ ligand of any one of aspects 1B to 8B, wherein the IL-2Rβ ligand independently comprises from 1 to 4 flanking glycines (SEQ ID NO: 9429) on the C-terminus, on the N-terminus, or on both the C-terminus and the N terminus.

[1516] Aspect 10B. An IL-2Rβ binding compound comprising the IL-2Rβ ligand of any one of aspects 1B to 9B.

[1517] Aspect 11B. The IL-2Rβ binding compound of aspect 10B, wherein the IL-2Rβ ligand is bound to a construct partner.

[1518] Aspect 12B. The IL-2Rβ binding compound of aspect 11B, wherein the construct partner is selected from an IgG Fc fragment, a ZW1_A fragment, a Cys-Hole fragment, a Cys-Knob fragment, an antibody, and a protein.

[1519] Aspect 13B. The IL-2Rβ binding compound of any one of aspects 11B to 12B, wherein the IL-2Rβ ligand is bound to the construct partner through a construct linker.

[1520] Aspect 14B. The IL-2Rβ binding compound of any one of aspects 10B to 13B, wherein the IL-2Rβ binding compound binds to hu-IL-2R with an IC50 less than 100 μM as determined using a phage ELISA competition assay.

[1521] Aspect 15B. The IL-2Rβ binding compound of any one of aspects 10B to 14B, wherein the IL-2Rβ binding compound binds to cyno-IL-2R with an IC50 less than 100 μM as determined using a phage ELISA competition assay.

[1522] Aspect 16B. The IL-2Rβ binding compound of any one of aspects 10B to 15B, wherein the IL-2Rβ binding compound comprises an IL-2Rγc ligand and an IL-2Rβ ligand wherein, the IL-2Rγc ligand binds to the hu-IL-2Rγc subunit with an IC50 less than 100 μM; the IL-2Rβ ligand binds to the hu-IL-2Rβ subunit with an IC50 less than 100 μM; and the IC50 is determined using a phage ELISA competition assay.

[1523] Aspect 17B. The IL-2Rβ binding compound of any one of aspects 10B to 16B, wherein the IL-2Rβ binding compound comprises an IL-2Rγc ligand and an IL-2Rβ ligand wherein, the IL-2Rγc ligand binds to the cyno-IL-2Rγc subunit with an IC50 less than 100 μM; the IL-2Rβ ligand binds to the cyno-IL-2Rβ subunit with an IC50 less than 100 μM; and the IC50 is determined using a phage ELISA competition assay.

[1524] Aspect 18B. An IL-2Rβγc ligand comprising:

[1525] the IL-2Rβ ligand of any one of aspects 1B to 9B; and

[1526] an IL-2Rγc ligand, wherein the IL-2Rγc ligand comprises:
[1527] an amino acid sequence of any one of any one of SEQ ID NOS: 944-1028, 1032-1060, and 1601-1613;
[1528] a truncated amino acid sequence of any of SEQ ID NOS: 944-1028, 1032-1060, and 1601-1613;
[1529] an amino acid sequence of any one of SEQ ID NOS: 944-1028, 1032-1060, and 1601-1613 having from 1 to 4 amino acid substitutions,
[1530] an amino acid sequence of any one of SEQ ID NOS: 944-1028, 1032-1060, and 1601-1613 having from 1 to 4 flanking glycines (SEQ ID NO: 9429);
[1531] an amino acid sequence having greater than 60% sequence similarity to any one of SEQ ID NOS: 944-1028, 1032-1060, and 1601-1613;
[1532] or a combination of any of the foregoing,

[1533] wherein the IL-2Rγc ligand binds to the hu-IL-2Rγc subunit with an IC50 less than 100 μM as determined using a phage ELISA competition assay.

[1534] Aspect 19B. The IL-2Rβγc ligand of aspect 18, wherein the IL-2Rγc ligand comprises:

[1535] an amino acid sequence of SEQ ID NO: 965;

[1536] a truncated amino acid sequence of SEQ ID NO: 965;

[1537] an amino acid sequence of SEQ ID NO: 965 having from 1 to 4 amino acid substitutions,

[1538] an amino acid sequence of SEQ ID NO: 965 having from 1 to 4 flanking glycines (SEQ ID NO: 9429);

[1539] an amino acid sequence having greater than 60% sequence similarity to SEQ ID NO: 965;

[1540] or a combination of any of the foregoing,

[1541] Aspect 20B. The IL-2Rβγc ligand of aspect 18B, wherein the IL-2Rγc ligand comprises the amino acid sequence of SEQ ID NO: 965.

[1542] Aspect 21B. The IL-2Rβγc ligand of aspect 18B, wherein, the IL-2Rβ ligand comprises amino acid sequence selected from SEQ ID NO: 2858 and SEQ ID NO: 2859; and the IL-2Rγc ligand comprises the amino acid sequence of SEQ ID NO: 965.

[1543] Aspect 22B. The IL-2Rβγc ligand of aspect 18B, wherein, the IL-2Rβγc ligand comprises the amino acid sequence of any one of SEQ ID NOS: 4100-4137, 4160-4168, and 4170-4185.

[1544] Aspect 23B. The IL-2Rβγc ligand of aspect 18B, wherein the IL-2Rβγc ligand has greater than 60% sequence similarity to an amino acid sequence selected from any one of SEQ ID NOS: 4100-4137, 4160-4168, and 4170-4185.

[1545] Aspect 24B. The IL-2Rβγc ligand of any one of aspects 18B to 23B, wherein the IL-2Rβ ligand is bound to the IL-2Rγc ligand through a ligand linker.

[1546] Aspect 25. The IL-2Rβγc ligand of aspect 24B, wherein the ligand linker comprises a rigid ligand linker.

[1547] Aspect 26. The IL-2Rβγc ligand of aspect 25B, wherein the rigid ligand linker comprises (PA)n where n is an integer from 1 to 20 (SEQ ID NO: 9421).

[1548] Aspect 27B The IL-2Rβγc ligand of aspect 25B, wherein the rigid ligand linker comprises (PA)n where n is an integer from 5 to 15 (SEQ ID NO: 1453).

[1549] Aspect 28B The IL-2Rβγc ligand of any one of aspects 18B to 27B, wherein a hu-IL-2R subunit binding ratio is from 10 to 1,000, wherein the hu-IL-2R subunit binding ratio is the ratio of the IC50 for binding of the IL-2Rβ ligand to the hu-IL-2Rβ subunit to the IC50 for binding of the IL-2Rγc ligand to the hu-IL-2Rγc subunit.

[1550] Aspect 29B. The IL-2Rβγc ligand of any one of aspects 18B to 27B, wherein a hu-IL-2R subunit binding ratio is from 0.1 to 0.001, wherein the hu-IL-2R subunit binding ratio is the ratio of the IC50 for binding of the hu-IL-2Rβ ligand to the IL-2Rβ subunit to the IC50 for binding of the IL-2Rγc ligand to the hu-IL-2Rγc subunit.

[1551] Aspect 30B The IL-2Rβγc ligand of any one of aspects 18B to 27B, wherein a hu-IL-2R subunit binding ratio is from 0.1 to 10 wherein the hu-IL-2R subunit binding ratio is the ratio of the IC50 for binding of the IL-2Rβ ligand to the hu-IL-2Rβ subunit to the IC50 for binding of the IL-2Rγc ligand to the hu-IL-2Rγc subunit.

[1552] Aspect 31B The IL-2Rβγc ligand of any one of aspects 18B to 27B, wherein a hu-IL-2R binding ratio is from 10 to 1,000, wherein the hu-IL-2R binding ratio is the ratio of the IC50 for binding of the IL-2Rβ ligand to hu-IL-2R to the IC50 for binding of the IL-2Rγc ligand to the hu-IL-2R.

[1553] Aspect 32B The IL-2Rβγc ligand of any one of aspects 18B to 27B, wherein a hu-IL-2R binding ratio is from 0.1 to 0.001, wherein the hu-IL-2R binding ratio is the ratio of the IC50 for binding of the IL-2Rβ ligand to IL-2R to the IC50 for binding of the IL-2Rγc ligand to IL-2R.

[1554] Aspect 33B The IL-2Rβγc ligand of any one of aspects 18B to 27B, wherein a hu-IL-2R binding ratio is from 0.1 to 10 wherein the hu-IL-2R binding ratio is the ratio of the IC50 for binding of the IL-2Rβ ligand to IL-2R to the IC50 for binding of the IL-2Rγc ligand to hu-IL-2R.

[1555] Aspect 34B. The IL-2Rβγc ligand of any one of aspects 18B to 33B, wherein the IL-2Rβγc ligand binds to hu-IL-2R with an IC50 less than 100 μM as determined using a phage ELISA competition assay.

[1556] Aspect 35B. The IL-2Rβγc ligand of any one of aspects 18B to 34B, wherein the IL-2Rβγc ligand binds to cyno-IL-2R with an IC50 less than 100 μM as determined using a phage ELISA competition assay.

[1557] Aspect 36B. The IL-2Rβγc ligand of any one of aspects 18B to 35B, wherein the IL-2Rβγc ligand is a hu-IL-2R agonist.

[1558] Aspect 37B. The IL-2Rβγc ligand of any one of aspects 18B to 36B, wherein the IL-2Rβγc ligand is a cyno-IL-2R agonist.

[1559] Aspect 38B. The IL-2Rβγc ligand of any one of aspects 18B to 37B, wherein the IL-2Rβγc ligand activates hu-IL-2R with an EC50 less than 100 μM as determined using a STAT5 phosphorylation assay in a TF-1-2Rβ engineered cell line or in PBMCs cells.

[1560] Aspect 39B. The IL-2Rβγc ligand of any one of aspects 18B to 38B, wherein the IL-2Rβγc ligand activates cyno-IL-2R with an EC50 less than 100 μM as determined using a STAT5 phosphorylation assay in cyno-PMBC cells.

[1561] Aspect 40B. An IL-2Rβγc binding compound comprising the IL-2Rβ ligand of any one of claims 1 to 9 and an IL-2Rγc ligand that binds to the IL-2Rγc subunit with an IC50 less than 100 μM; or the IL-2Rβγc ligand of any one of aspects 18B to 39B.

[1562] Aspect 41B. The IL-2Rβγc binding compound of aspect 40B, wherein the IL-2Rβγc ligand is bound to a construct partner.

[1563] Aspect 42B. The IL-2Rβγc binding compound of aspect 41B, wherein the construct partner is selected from an IgG Fc fragment, a ZW1_A fragment, a Cys-Hole fragment, a Cys-Knob fragment, an antibody, and a protein.

[1564] Aspect 43B. The IL-2Rβγc binding compound of any one of aspects 41B to 42B, wherein the construct partner comprises a cell targeting moiety.

[1565] Aspect 44B. The IL-2Rβγc binding compound of aspect 43B, wherein cell-targeting moiety comprises a tumor-targeting moiety, an immune cell-targeting moiety, or a combination thereof.

[1566] Aspect 45B. The IL-2Rβγc binding compound of any one of aspects 41B to 44B, wherein the IL-2Rβγc ligand is bound to the construct partner through a construct linker.

[1567] Aspect 46B. The IL-2Rβγc binding compound of any one of aspects 40B to 45B, wherein the IL-2Rβγc binding compound binds to hu-IL-2R with an IC50 less than 100 μM as determined using a phage ELISA competition assay.

[1568] Aspect 47B. The IL-2Rβγc binding compound of any one of aspects 40B to 46B, wherein the IL-2Rβγc binding compound binds to cyno-IL-2R with an IC50 less than 100 μM as determined using a phage ELISA competition assay.

[1569] Aspect 48B. The IL-2Rβγc binding compound of any one of aspects 40B to 47B, wherein the IL-2Rβγc binding compound is a hu-IL-2R agonist.

[1570] Aspect 49B. The IL-2Rβγc binding compound of any one of aspects 40B to 48B, wherein the IL-2Rβγc binding compound is a cyno-IL-2R agonist.

[1571] Aspect 50B. The IL-2Rβγc binding compound of any one of aspects 40B to 49B, wherein the IL-2Rβγc binding compound activates hu-IL-2R with an EC50 less than 100 μM as determined using a STAT5 phosphorylation assay in TF1-2Rβ engineered cell line or in PBMCs cells.

[1572] Aspect 51B. The IL-2Rβγc binding compound of any one of aspects 40B to 50B, wherein the IL-2Rβγc binding compound activates cyno-IL-2R with an EC50 less than 10 μM as determined using a STAT5 phosphorylation assay in cyno-PMBC cells.

[1573] Aspect 52B. The IL-2Rβγc binding compound of any one of aspects 40B to 51B, wherein a hu-IL-2R binding ratio is from 10 to 1,000, wherein the hu-IL-2R binding ratio is the ratio of the IC50 for binding of the IL-2Rβ ligand to hu-IL-2R to the IC50 for binding of the IL-2Rγc ligand to the hu-IL-2R.

[1574] Aspect 53B. The IL-2Rβγc binding compound of any one of aspects 40B to 51B, wherein a hu-IL-2R binding ratio is from 0.1 to 0.001, wherein the hu-IL-2R binding ratio is the ratio of the IC50 for binding of the IL-2Rβ ligand to IL-2R to the IC50 for binding of the IL-2Rγc ligand to IL-2R.

[1575] Aspect 54B. The IL-2Rβγc binding compound of any one of aspects 40B to 51B, wherein a hu-IL-2R binding ratio is from 0.1 to 10 wherein the hu-IL-2R binding ratio is the ratio of the IC50 for binding of the IL-2Rβ ligand to IL-2R to the IC50 for binding of the IL-2Rγc ligand to hu-IL-2R.

[1576] Aspect 55B. The IL-2Rβγc binding compound of aspect 40B, wherein the IL-2Rβγc binding compound comprises an amino acid sequence of any one of SEQ ID NOS: 8100-8136, or an amino acid sequence having greater than 60% sequence similarity to any one of SEQ ID NOS: 8100-8136.

[1577] Aspect 56B. The IL-2Rβ ligand of any one of aspects 1B to 9B the IL-2Rβ binding compound of any one of aspects 10B to 17B, the IL-2Rβγc ligand of any one of aspects 18B to 39B, or the IL-2Rβγc binding compound of any one of aspects 40B to 55B, wherein the IL-2Rβ ligand, the IL-2Rβ binding compound, the IL-2Rβγc ligand, or the IL-2Rβγc binding compound bind to the specific binding site of the IL-2Rβ subunit with an IC50 less than 100 μM.

[1578] Aspect 57B. The IL-2Rβγc ligand of any one of aspects 18B to 39B, or the IL-2Rβγc binding compound of any one of aspects 40B to 55B, wherein the IL-2Rγc ligand, the IL-2Rβγc ligand, or the IL-2Rβγc binding compound bind to the specific binding site of the IL-2Rγc subunit with an IC50 less than 100 μM.

[1579] Aspect 58B. A pharmaceutical composition comprising: the IL-2Rβ ligand of any one of aspects 1B to 9B, 56B and 57B; the IL-2Rβ binding compound of any one of aspects 10B to 17B, 56B and 57B; the IL-2Rβγc ligand of any one of aspects 18B to 39B, 56B and 57B; the IL-2Rβγc binding compound of any one of aspects 40B to 57B; or a combination of any of the foregoing.

[1580] Aspect 59B. A method of treating a disease in a patient comprising administering to a patient in need of such treatment a therapeutically effective amount of: the IL-2Rβ ligand of any one of aspects 1B to 9B, 56B and 57B; the IL-2Rβ binding compound of any one of aspects 10B to 17B, 56B and 57B; the IL-2Rβγc ligand of any one of aspects 18B to 39B, 56B and 57B; the IL-2Rβγc binding compound of any one of aspects 40B to 57B; or the pharmaceutical composition of aspect 58B.

[1581] Aspect 60B. The method of aspect 59B, wherein the disease is selected from cancer, an autoimmune disease, an inflammatory disease, an infectious disease, and a viral disease.

[1582] Aspect 61B. A method of expanding immune cells comprising contacting a population of immune cells ex vivo or in vivo with an effective amount of: the IL-2Rβ ligand of any one of aspects 1B to 9B, 56B and 57B; the IL-2Rβ binding compound of any one of aspects 10B to 17B, 56B and 57B; the IL-2Rβγc ligand of any one of aspects 18B to 39B, 56B and 57B; or the IL-2Rβγc binding compound of any one of aspects 40B to 57B.

[1583] Aspect 62B. A method of expanding immune cells comprising contacting a population of immune cells ex vivo or in vivo with an effective amount of: the IL-2Rβ ligand of any one of aspects 1B to 9B, 56B and 57B; the IL-2Rβ binding compound of any one of aspects 10B to 17B, 56B and 57B; the IL-2Rβγc ligand of any one of aspects 18B to 39B, 56B and 57B; or the IL-2Rβγc binding compound of any one of aspects 40B to 57B.

[1584] Aspect 63B. A method of boosting a vaccine comprising administering to a patient a vaccine and a therapeutically effective amount of: the IL-2Rβ ligand of any one of aspects 1B to 9B, 56B and 57B; the IL-2Rβ binding compound of any one of aspects 10B to 17B, 56B and 57B; the IL-2Rβγc ligand of any one of aspects 18B to 39B, 56B and 57B; or the IL-2Rβγc binding compound of any one of aspects 40B to 57B.

[1585] Aspect 64B. A method of modifying the immune response comprising administering to a patient an effective amount of: the IL-2Rβ ligand of any one of aspects 1B to 9B, 56B and 57B; the IL-21213 binding compound of any one of aspects 10B to 17B, 56B and 57B; the IL-2Rβγc ligand of any one of aspects 18B to 39B, 56B and 57B; or the IL-2Rβγc binding compound of any one of aspects 40B to 57B.

[1586] Aspect 65B. A nucleic acid encoding for a polypeptide comprising: the IL-2Rβ ligand of any one of aspects 1B to 9B, 56B and 57B; the IL-2Rβ binding compound of any one of aspects 10B to 17B, 56B and 57B; the IL-2Rβγc ligand of any one of aspects 18B to 38B, 56B and 57B; or the IL-2Rβγc binding compound of any one of aspects 40B to 57B.

### EXAMPLES

[1587] The following examples describe in detail methods of synthesizing IL-2Rβγc ligands, methods of synthesizing IL-2Rβγc constructs, and methods of determining the activity of IL-2Rβγc ligands and IL-2Rβγc ligand constructs provided by the present disclosure. The following examples also describe in detail methods for determining properties of the IL-2Rβγc ligands and IL-2Rβγc constructs provided by the present disclosure. It will be apparent to those skilled in the art that many modifications, both to materials and methods, may be practiced without departing from the scope of the invention.

[1588] In the examples, the IL-2Rβ subunit refers to human IL-2Rβ (CD122 protein, Fc Tag) (27-239), Accession No. NP 000869.1 and was obtained from ACRObiosystems, Inc., product number ILB-H5253.

[1589] The IL-2Rγc subunit refers to human IL-2Rγc (CD132 protein, Fc Tag) (23-254), Accession No. AAH14972 and was obtained from ACRObiosystems, Inc., product number ILG-H5256.

[1590] The cyno-IL-2Rβ subunit refers to the cynomolgus monkey IL-2Rβ subunit, Accession No. NP_000869.1 and was obtained from Sino Biological Inc., product number 90328-C02H.

[1591] In the examples, the IL-2Rγc subunit refers to the cynomolgus monkey Rγc subunit, Accession No. XP_005503949.1

### Example 1

### Synthesis of IL-2Rβ Ligands, IL-2Rγc Ligands and Peptidyl IL-2Rβγc Ligands

[1592] IL-2Rβ ligands, IL-2Rγc ligands, and peptidyl IL-2Rβγc ligands were synthesized by single chain solid phase synthesis.

[1593] 2-Cholorotrityl resin (1 g, 1.5 mmole/g, from Anaspec) was washed with DMF (2×), and then allowed to stand in 50 mL DMF for 10 min. The swollen resin was treated with an activated solution of Fmoc-glycine prepared from 5 eq. of amino acid and 5 eq. of HATU dissolved at 0.5M in DMF, followed by the addition of 10 eq. of DIEA, and the mixture gently stirred for 30 min at 25° C. The resin was washed (DMF, THF, DCM, and MeOH) and dried to yield the Fmoc-protected resin. Fmoc groups were then removed by gently shaking the resin with 30% piperidine in DMF for 20 min, followed by washing (DMF, THF, DCM, and MeOH), and drying. The resin was then subjected to repeated cycles of Fmoc-amino acid couplings with HATU activation and Fmoc removal with piperidine to build a desired amino acid sequence. Except for the four cysteine residues of the sequence, standard 95% TFA-labile amino acid sidechain protecting groups were used. For the two cysteine residues proximal to the resin, Trt protection was used, and for the two cysteine residues distal to the resin, Acm protection was used. After Fmoc removal from the final amino acid of the dimer sequence, the terminal amine groups were acylated with acetic anhydride (10 eq.) and DIEA (20 eq.) in DMF for 20 min, followed by washing as described above.

[1594] The completed peptide was cleaved from the resin by suspension in a solution of TFA (95 vol %), water (2.5 vol %), and triisopropylsilane (2.5 vol %) for 3 h at 25° C. The TFA solution was cooled to 5° C. and poured into Et₂O to precipitate the peptide. Filtration and drying under reduced pressure gave the desired peptide. Purification via preparative HPLC with a C₁₈ column afforded the pure peptide with the two C-terminal thiol groups in a reduced state. This peptide was dissolved in 20% DMSO/water (1 mg dry weight peptide/mL) and allowed to stand at 25° C. for 36 h, and then purified by reverse phase HPLC to provide the peptide with the two C-terminal thiols linked by a disulfide bridge. The two N-terminal Acm-protected cysteine residues were then deprotected by dissolving 0.1 mmole of peptide in 25 mL of 50% acetic acid/H₂O and 2.5 mL of 1M HCl and adding 5 mL of 0.1M iodine (in glacial acetic acid; 5 eq.) dropwise with stirring under a nitrogen atmosphere. The deprotection/oxidation reaction was allowed to proceed for 2 h at 25° C. with frequent monitoring (analytical HPLC) to ensure complete reaction. The reaction was stopped by addition of ice-cooled diethyl ether (9 volume eq.). The resulting solution was cooled on dry ice (3 min), the ether solution carefully decanted, and the resulting light-yellow solid purified by preparative reverse phase HPLC (95%) to yield the final single-chain peptide dimer.

### Example 2

### Synthesis of IL-2Rβγc Ligands Using Click Chemistry

[1595] The peptide sequences of an IL-2Rβ ligand and an IL-2R_{N} ligand were synthesized separately using standard solid phase synthesis conditions and Fmoc-protected amino acids as described in Example 1.

[1596] Rink amide-MBHA resin (1 g, 1.5 mmole/g, Anaspec) was washed with DMF (2×), and then allowed to stand in 50 mL DMF for 10 min. Separate portions of the swollen resin were treated with either an activated solution of Fmoc-propargyl glycine (IL-2Rβ ligand) or 2-(Fmoc-NH)-5-azido-pentanoic acid (IL-2Rγc ligand) prepared from 5 eq. of amino acid and 5 eq. of HATU dissolved at 0.5M in DMF, followed by the addition of 10 eq. of DIEA, and the mixture was gently stirred for 30 min at 25° C. The resin was washed (DMF, THF, DCM, and MeOH) and dried to yield the Fmoc-protected resin. Fmoc groups were then removed by gently shaking the resin in 30% piperidine in DMF for 20 min, followed by washing (DMF, THF, DCM, and MeOH), and drying. The resin was then subjected to repeated cycles of Fmoc-amino acid couplings with HATU activation and Fmoc removal with piperidine to provide a desired IL-2Rβ ligand amino acid sequence and a desired IL-2Rβγc ligand amino acid sequence. Standard 95% TFA-labile amino acid sidechain protecting groups were used for all residues. After Fmoc removal from the final amino acid of each ligand sequence, the terminal amine groups were acylated with acetic anhydride (10 eq.) and DIEA (20 eq.) in DMF for 20 min.

[1597] Each completed ligand was cleaved from the resin by suspension in a solution of TFA (95%), water (2.5%), and triisopropylsilane (2.5%) for 3 h at 25° C. The TFA solution was cooled to 5° C. and poured into Et₂O to precipitate the peptide. Filtration and drying under reduced pressure gave the desired ligands. Purification via preparative HPLC with a C₁₈ column afforded the pure peptides with the two thiol groups in a reduced state. The ligands were separately dissolved in 20% DMSO/water (1 mg dry weight peptide/mL), allowed to stand at 25° C. for 36 h., and then purified by reverse phase HPLC to provide the IL-2Rβ and IL-2Rγc ligands with the two thiols linked via an intramolecular disulfide bridge.

[1598] Two-tenths (0.2) mL of a 2.0 mM solution of purified alkyne-containing ligand was prepared by dissolving the ligand in 1:1 H₂O/tBuOH. Similarly, 0.2 mL of a 2.4 mM solution of the purified azide-containing ligand was prepared using the same solvent. The two ligand solutions along with 0.1 mL of 100 mM CuSO₄ in H₂O, 0.1 mL of 250 mM of a Cu(I) chelating agent such as DIEPA, pyridine, or THPTA (tris(3-hydroxypropyltriazolylmethyl)amine), in 3:1 DMSO/tBuOH, 0.1 mL of 0.5 M ascorbic acid in H₂O, and 0.3 mL of 3:2 tBuOH/H₂O were combined, and the reaction allowed to proceed at 45° C. under anaerobic conditions. Reaction progress was monitored frequently by LC/MS, and additional azide-containing ligand and CuSO₄ were added to drive the reaction to completion. After the maximal amount of alkyne was consumed (approx. 3 h), the reaction was quenched by addition of approx. 8 mL of 1:1 H₂O/ACN, and the peptide dimer purified (95%) using a preparative-scale C₁₈ HPLC column.

[1599] The structure of IL-2Rβ ligands and IL-2Rγc ligands used in the experimental examples is provided in Tables 11 and 12, and in FIGS. 19A-19C.

TABLE 11
IL-2Rβ Ligands.

| | |
|---|---|
| SEQ ID NO: 58 | Y D C R I A Q V G E L C D L |
| SEQ ID NO: 671 | V Q Y K K C W M A Q L G D L C E L D P |
| | S |
| SEQ ID NO: 664 | Y P C H M A Q L G E L C D L W S W G D |
| | I |
| SEQ ID NO: 612 | Y P C W M A Q L G E L C D L |
| SEQ ID NO: 865 | W Y P C W M A Q L G E L C D L D |
| SEQ ID NO: 869 | F Y P C W T A L L G E L C D L E P G P |
| | P A M |
| SEQ ID NO: 870 | W G T T W R W Y P C W M A Q L G E L C |
| | D L E |
| SEQ ID NO: 864 | D V L G D R W Y P C W I A K L G E L C |
| | D L D |
| SEQ ID NO: 874 | W Y P C W I A Q L G E L C D L D |
| SEQ ID NO: 875 | W Y P C W L A K L G E L C D L D |
| SEQ ID NO: 901 | W Y P C W M A Q L G D L C D L E K P V |
| | T E R |
| SEQ ID NO: 856 | W R R W Y P C W V A Q V G E L C D L E |
| | I E A |
| SEQ ID NO: 858 | R Q R W Y P C W M A R L G E L C D L D |
| | E P T |

TABLE 12
IL-2Rγc Ligands.

| | |
|---|---|
| SEQ ID NO: 222 | V M C E R W Q G V E L C W L |
| SEQ ID NO: 224 | D C S M W E G V E L C W |
| SEQ ID NO: 965 | V V C Q D W E G V E L C W Q |
| SEQ ID NO: 985 | W S K K A E V V C E E W G G V E F C |
| | W I |
| SEQ ID NO: 1024 | R T G V E C Q D W H G V E L C W P V |
| | W E |
| SEQ ID NO: 1028 | V G I E C E E W A G V E L C W L |
| SEQ ID NO: 981 | T W N M S E L E C Q D W N G V E I C |
| | W H |
| SEQ ID NO: 1026 | R T E V E C E D W E G V E L C W L |

### Example 3

### STAT5 Phosphorylation in TF-1β Cells with IL-2Rβγc Ligands Having Different Ligands/Orientations/Linkers

[1600] IL-2Rβγc ligands were evaluated for induction of STAT5 phosphorylation in TF-1β cells. TF-1β cells were derived from the growth factor-dependent human erythroleukemia cell line TF-1 (ATCC #CRL-2003), which naturally expresses IL-2Rγc but not IL-2Rβ. The cells were engineered to be IL-2 responsive by transfection with human full-length IL-2Rβ. A cell line expressing higher levels of IL-2Rβ was selected by growth in IL-2, and both IL-2Rβ and IL-2Rγc subunit expression levels were verified by qPCR and FACS analysis.

[1601] To test compounds for induction of STAT5 phosphorylation TF-1β cells were starved overnight at 5×10⁵ cells/mL in starvation medium (RPMI 1640+2.5 g/L glucose+5% FBS+2 mM L-glutamine+1 mM NaPyr+10 mM HEPES with no GM-CSF or rhu-IL-2 supplement) in T75 flasks. The following day, cells were plated in 96-well V-bottom plates at 2×10⁵ cells/well. Three-fold serial dilutions of IL-2Rβγc ligands or IL-2 in starvation media were added to the cells and incubated for 30 min at 37° C. Cell extracts were prepared by adding a mixture of 10× Cell Lysis Buffer (Cell Signaling Technology #9803) and 1× HALT Phosphatase and Protease Inhibitor Cocktail (Thermo Fisher #78442) directly to the wells. The plates were agitated at 25° C. for 5 min to prepare cell extracts for immediate use or stored at −80° C. Detection of pSTAT5 was performed using a PathScan® Phospho-Stat5 (Tyr694) Sandwich ELISA Kit (Cell Signaling Technology #7113). Cell extracts were added to microwells that were pre-coated with a mouse anti-phospho-STAT5 antibody and incubated overnight at 4° C. Wells were then washed with PBS and bound phospho-STAT5 (Tyr694) was detected by adding a rabbit anti-STAT5 detection antibody and incubating for 1 h at 37° C. Wells were washed with PBS and an anti-rabbit IgG HRP-linked antibody was added to each well. After a final wash TMB substrate solution was added to measure the amount of HRP in each well. Absorbance at 450 nm was read in a microplate reader. The signal that was produced is proportional to the quantity of phosphorylated STAT5 in each cell extract.

[1602] The results are presented in FIG. 2.

[1603] The structures of the IL-2Rβγc ligands evaluated in FIG. 2 are provided in FIGS. 19A-19C.

### Example 4

### STAT5 Phosphorylation in NK-92 Cells with IL-2Rβγc Ligands Having Different IL-2Rβ and IL-2Rγc Ligands with a C/C Orientation and with the Same Ligand Linker

[1604] IL-2Rβγc ligands were evaluated for induction of STAT5 phosphorylation in NK-92 cells, a human cell line that expresses all three IL-2 receptor subunits, and which is responsive to IL-2Rβγc-biased variants as well as wild type IL-2. To test compounds for induction of STAT5 phosphorylation, NK-92 cells were starved overnight in starvation medium (RPMI 1640+20% FBS+2 mM L-glutamine+1 mM NaPyr+10 mM HEPES+0.1 mM BME with no rhu-IL-2 supplement) at 37° C. in T75 flasks. The following day, the NK-92 cells were plated in 96-well V-bottom plates at 2×10⁵ cells/well. Three-fold serial dilutions of test compounds or IL-2 in starvation media were added to the cells and incubated for 30 min at 37° C.

[1605] Cell extracts were prepared and the amount of phosphorylated STAT5 was measured using the PathScan® Phospho-Stat5 (Tyr694) Sandwich ELISA Kit as described in Example 3.

[1606] The results are presented in FIG. 3.

[1607] The structures of the IL-2Rβγc ligands evaluated in FIG. 3 are provided in FIGS. 19A-19C.

### Example 5

### STAT5 Phosphorylation in NK-92 Cells with IL-2Rβγc Ligands Having Different Orientations

[1608] The agonist activity of IL-2Rβγc ligands comprising the same IL-2Rβ and IL-2Rγc ligands bound to the same ligand linker but with different N/C orientations was evaluated using a STAT5 phosphorylation assay in NK-92 cells.

[1609] IL-2Rβγc ligands were incubated with NK-92 cells and STAT5 phosphorylation measured as a function of concentration using the methods described in Example 4.

[1610] The results are presented in FIG. 4.

[1611] The structures of the IL-2Rβγc ligands evaluated in FIG. 4 are provided in FIGS. 19A-19C.

### Example 6

### STAT5 Phosphorylation in TF-1β Cells with IL-2Rβγc Ligands with Different Ligands

[1612] The agonist activity of IL-2Rβγc ligands comprising different IL-2Rβ and IL-2Rγc ligands bound to the same synthetic ligand linker and with the same N/C orientation was evaluated using a STAT5 phosphorylation assay in TF-1β cells.

[1613] Compounds were incubated with TF-1β cells and STAT5 phosphorylation was measured as a function of concentration using the methods described in Example 3.

[1614] The results are presented in FIGS. 5A and 5B.

[1615] The structures of the IL-2Rβγc ligands evaluated in FIGS. 5A and 5B are provided in FIGS. 19A-19C.

### Example 7

### STAT5 Phosphorylation in NK-92 Cells with IL-2Rβγc Ligands with Different Linkers

[1616] The agonist activity of IL-2Rβγc ligands comprising the same IL-2Rβ and IL-2Rγc ligands bound to a synthetic IL-2Rβγc ligand linker (IL-2Rβγc ligand (BGL20)) or to a peptidyl IL-2Rβγc ligand linker (IL-2Rβγc ligand (BGL21)) and with the same N/C orientation was evaluated using a STAT5 phosphorylation assay in NK-92 cells.

[1617] IL-2Rβγc ligands were incubated with NK-92 cells and STAT5 phosphorylation was measured as a function of concentration using the methods described in Example 4.

[1618] The results are presented in FIG. 6.

[1619] The structures of the IL-2Rβγc ligands evaluated in FIG. 6 are provided in FIGS. 19A-19C.

### Example 8

### STAT5, AKT and ERK1/2 Phosphorylation in NK-92 Cells with IL-2 and an IL-2Rβγc Ligand

[1620] The agonist activity of IL-2 and an IL-2Rβγc ligand (BGL21) was evaluated using STAT5 phosphorylation, AKT phosphorylation, and ERK1/2 phosphorylation assays in NK-92 cells.

[1621] Compounds were incubated with NK-92 cells and STAT5 phosphorylation was measured as a function of concentration using the methods described in Example 4. Detection of phosphorylated AKT was performed using the PathScan® Phospho-AKT (Thr308) Sandwich ELISA Kit (Cell Signaling Technology #7252). Detection of phosphorylated ERK1/2 was performed using PathScan® Phospho-p44/42 MAPK (Thr202/Tyr204) Sandwich ELISA Kit (Cell Signaling Technology #7177).

[1622] The results are presented in FIG. 7A for STAT5 phosphorylation, in FIG. 7B for AKT phosphorylation, and in FIG. 7C for ERK1/2 phosphorylation.

[1623] The structures of the IL-2Rβγc ligands evaluated in FIGS. 7A-7C are provided in FIGS. 19A-19C.

### Example 9

### Proliferation of NK-92 with IL-2 and an IL-2Rβγc Ligand

[1624] NK-92 cells were plated in starvation media (minus growth factors) and incubated with serial dilutions of IL-2Rβγc ligand (BGL21) or IL-2 at 37° C. for 48 h. The number of viable cells present in each well was quantified by measuring ATP levels, which is an indicator of metabolically active cells, using a CellTiter-Glo® Assay Kit (Promega #G7571). An equal volume of CellTiter-Glo® reagent was added to each well and incubated at 25° C. for 10 min. Luminescence signals were measured using a Wallac Victor 1420 plate reader. Values (in relative light units (RLU)) were plotted as a function of the concentration of the test compounds.

[1625] The results are provided in FIG. 8A.

[1626] NK-92 cell proliferation in response to IL-2Rβγc ligand (BGL21) or IL-2 was also measured using Ki67 staining. The nuclear protein Ki67 is present during all active phases of the cell cycle but is absent in resting cells. NK-92 cells were resuspended in starvation medium and plated at 2×10⁵ cells/well in a 96-well plate. Three-fold serial dilution of the test compound was then added to the cells for 48 h. Following the incubation period, cells were treated with Live/Dead® Fixable Aqua Dye (ThermoFisher #L34966) for 30 min to stain for viable cells. The cells were then washed with PBS and then fixed and permeabilized for 1 h at 25° C. with Foxp3 Transcription Factor Fix/Perm® buffer (eBioscience #00-5523). Cells were washed and then stained with anti-Ki67 PE antibody. After a final wash the cells were analyzed by flow cytometry on an LSR II instrument (Becton Dickinson). Data analysis was performed using FlowJo® software. The median fluorescence intensity of Ki67+ cells is plotted as a function of test compound concentration.

[1627] The results are provided in FIG. 8B.

[1628] The structure of IL-2Rβγc ligand (BGL21) is provided in FIGS. 19A-19C.

### Example 10

### STAT-5 Phosphorylation in Resting CD8+ T-Cells, CD4+ T-Cells and Treg Cells

[1629] The agonist activity of IL-2 and an IL-2Rβγc ligand (IL-2Rβγc ligand (BGL21)), in resting CD8+ T-cells, CD4+ T-cells, and Treg cells was evaluated using a STAT5 phosphorylation assay.

[1630] Human peripheral blood mononuclear cells (PBMC) were isolated from buffy coats using Lymphoprep® (Stemcell Technologies #07811) density gradient centrifugation. The recovered PBMCs were resuspended in T-cell medium (CTS OpTmizer® medium+2 mM L-glutamine+Pen/Strep with no serum or IL-2) at 2×10⁶ cells/mL and incubated for 3 h at 37° C. PBMCs were then added to a 96-well deep well plate at 10⁶ cells/well. Three-fold serial dilutions of IL-2Rβγc ligand (BGL21) or IL-2 were added to the cells and incubated for 30 min at 37° C. The cells were then fixed in Fix/Perm® buffer (Transcription Factor Phospho Buffer Set, BD Biosciences #563239) for 50 min on ice, followed by permeabilization in Perm Buffer III for 20 min on ice. Cells were washed several times using Perm/Wash® buffer. Antibody conjugates used for cell surface and intracellular staining are shown in Table 13.

TABLE 13
Antibody conjugates used for cell surface and intracellular staining.

| Marker | Clone | Channel | Supplier | Cat. No. |
|---|---|---|---|---|
| CD127 | eBioRDR5 | FITC | Invitrogen | 11-1278-42 |
| pSTAT5 | 47 | PE | BD¹ | 612567 |
| CD25 | M-A251 | PE-CF594 | BD | 562403 |
| CD56 | CMSSB | PerCP- | Invitrogen | 46-0567-42 |
| CD16 | eBioCB16 | eFl710 | Invitrogen | 46-0168-42 |
| Foxp3 | 236A/E7 | AF647 | BD | 561184 |
| CD3 | UCHT1 | BV421 | BD | 562426 |
| CD8 | SK1 | BV510 | BD | 563919 |

[1631] ¹ BD Biosciences.

[1632] Antibody mixtures were added to the cells and incubated for 30 min on ice and protected from light. Cells were washed with Perm/Wash® buffer and resuspended in PBS+2% FBS. Each test sample was analyzed by flow cytometry on an LSR II instrument (Becton Dickinson). Data analysis was performed using FlowJo® software. The percent of pSTAT5+ cells in each blood cell population was plotted as a function of the concentration of test compound.

[1633] The results are presented in FIGS. 9A-9C.

### Example 11

### Proliferation in NK Cells from Human PBMCs

[1634] Human PBMCs were isolated from a buffy coat by density gradient centrifugation (Lymphoprep®, Stemcell Technologies #07811) and cultured overnight in T-cell medium (CTS OpTmizer®, ThermoFisher #A1048501) at 3×10⁶ cells/mL in a T75 flask. The following day, cells were resuspended in fresh medium and plated at 5×10⁵ cells/well in a 96-well cell culture plate. Three-fold serial dilutions of either IL-2 or an IL-2Rβγc ligand (BGL21) were added to the cells and incubated for 3 days at 37° C. After the treatment, cells were incubated in viability dye (Live/Dead® Fixable Aqua Cell Stain Kit, ThermoFisher #L34965) for 30 min at 37° C., after which surface antibody staining was then performed in PBS+2% FBS for 30 min on ice. Cells were fixed and permeabilized with Fixation/Permeabilization Buffer (eBioscience Foxp3/Transcription Staining Buffer Set, ThermoFisher #00-5523-00) for 30 min on ice. Intracellular (Ki-67) staining was performed in Permeabilization Buffer for 30 min on ice and the treated cells resuspended in PBS+2% FBS prior to FACS analysis. NK cells were identified as CD56+ and/or CD159a+ cells from CD3− and CD20− (non-T, non-B cell) populations. Antibody conjugates used for cell surface and intracellular staining are shown in Table 14.

TABLE 14
Antibody conjugates used for cell surface and intracellular staining.

| Marker | CD3 | Ki-67 | CD56 | CD20 | CD45RA | CD8 | CD159a | Live/Dead |
|---|---|---|---|---|---|---|---|---|
| Fluor | FITC | PE | PerCP-eFluor710 | PE-Cy7 | APC | BV421 | BV650 | Aqua |
| Clone | UCHT1 | SolA15 | CMSSB | 2H7 | HI100 | SK1 | 131411 | — |
| Vendor | Invitrogen | Invitrogen | Invitrogen | BioLegend | BD | BioLegend | BD | Invitrogen |
| Cat. no. | CD0301 | 12-2698-82 | 46-0567-42 | 302312 | 550855 | 344748 | 747920 | L349650 |

[1635] The results are presented in FIGS. 10A and 10B.

### Example 12

### Upregulation of PD-LI in A549 Tumor Cells and Tumor Cell Lysis PD-L1 Upregulation

[1636] Human peripheral blood mononuclear cells (PBMC) were isolated from buffy coats by density gradient centrifugation. Human lung carcinoma A549 cells (ATCC CCL-185) were seeded overnight in 6-well plates at 10⁶ cells/well. The next day, freshly isolated PBMCs were added to the A549 cells at 10⁷ cells/well for a final effector-to-target ratio (E:T) of 10:1. Serial dilutions of IL-2Rβγc ligand (BGL21) or IL-2 were added to the wells and cells were incubated at 37° C. for 48 h. PBMCs were then aspirated from the wells and the adherent A549 cells were collected using 0.25% (w/v) Trypsin-0.53 mM EDTA solution. Cells were washed with PBS and stained with the antibody mixture shown in Table 15 to quantify the levels of PD-L1 expression on A549 cells and to exclude PBMCs from the analysis.

TABLE 15
Cell-staining antibody mixture.

| Marker | CD14 | PD-L1 | CD56 | CD20 | CD3 |
|---|---|---|---|---|---|
| Channel | FITC | PE | PerCP- | PE-Cy7 | BV421 |
| | | | eFl710 | | |

[1637] Samples were analyzed by flow cytometry on an LSR II instrument (Becton Dickinson). The percent of A549 cells staining positive for PD-L1 was plotted as a function of the concentration of the test compound.

[1638] The results are presented in FIG. 11A.

### Example 13

### PBMC Tumor Cell Lysis

[1639] Freshly isolated PBMCs (effector cells) were resuspended in T-cell medium (CTS OpTmizer® medium+2 mM L-glutamine+Pen/Strep with no serum or hu-IL-2) and plated at 6×10⁵ cells/well in a 96-well cell culture plate. Human colon carcinoma cell lines LS180 (ATCC CL-187) and COLO 205 (ATCC CCL-222) (target cells) were added to the PBMCs at 3×10⁴ cells/well for a final E:T ratio of 20:1. Dilutions of an IL-2Rβγc ligand (BGL21) or IL-2 were then added to the wells and cells were incubated at 37° C. for 48 hours. Cell supernatants were collected by centrifugation and 50 μL from each well was transferred to a 96-well plate. Tumor cell lysis was quantified by measuring LDH release with the Promega CytoTox 96® Non-Radioactive Cytotoxicity Assay Kit (#G1780). An equal volume of CytoTox 96® reagent was added to each well and incubated at 25° C. for 30 min. Stop solution (50 μL) was then added to each well to terminate the reaction and the absorbance signal was measured at 490 nm in a Wallac Victor 1420 plate reader. The percent cytotoxicity was calculated by dividing the value obtained for each sample by the maximum value obtained from supernatants obtained from wells treated with lysis buffer.

[1640] The results are presented in FIGS. 11B and 11C.

### Example 14

### Recombinant Fusion Proteins Incorporating an IL-2Rβγc Ligand

[1641] Immunoglobulin Fusions: Multiple mammalian expression vectors were constructed to express IL-2Rβγc ligands linked to full-length human IgG, or to Fc-fragments consisting of the CH2 and CH3 domains of the heavy chain and hinge regions of human IgG1, IgG2, or IgG4. Each vector contained a strong constitutive promoter (CMV or hEF1-HTLV) and an IL-2 signal peptide sequence for secretion of the fusion protein into the culture media. Vectors were designed to enable peptide ligands to be fused to either the N- or C-terminus of the immunoglobulin proteins and to incorporate construct linkers of varying lengths between the IL-2Rβγc ligands and IgG.

[1642] Fusion proteins were transiently expressed in 293 human embryonic kidney cells (FreeStyle® 293-F) by transfecting plasmid DNA into the cells using polyethyleneimine reagent PEI MAX (Polysciences, Inc.). Transfected cells were grown in FreeStyle® 293 Expression Medium (Thermo Fisher) in shaker flasks in a 37° C. humidified CO₂ incubator on an orbital shaker rotating at 125 rpm. Cultures were harvested 96 h post-transfection by centrifugation and the secreted fusion proteins were purified from the supernatants using protein A affinity chromatography.

[1643] Protein A agarose resin was mixed with culture supernatant and incubated at room temperature for several hours. The resin was then washed three times with PBS and bound IgG IL-2Rβγc ligand fusion was eluted with 0.1 M glycine buffer (pH 2.8). Eluates were neutralized with 1M Tris buffer and quantified by measuring absorbance at 280 nm using a NanoDrop® spectrophotometer. Protein concentrations were determined using calculated extinction coefficients derived from the primary sequence of the protein. Size exclusion chromatography was used to remove high molecular weight impurities prior to measuring the activities of the fusion proteins in bioassays.

[1644] Human Serum Albumin Fusion: A mammalian expression vector was constructed to express IL-2Rβγc ligands linked to the C-terminus of human serum albumin (HSA). A 6×-His tag (SEQ ID NO: 9431) was linked to the N-terminus of HSA for purification purposes. The vector contains a strong constitutive promoter (hEF1-HTLV) and an IL-2 signal peptide sequence for secretion of the fusion protein into the culture media.

[1645] HSA-IL-2Rβγc ligand fusion protein was transiently expressed in 293 human embryonic kidney cells (FreeStyle® 293-F) by first transfecting plasmid DNA into the cells using polyethyleneimine reagent PEI MAX (Polysciences, Inc.). Transfected cells were grown in FreeStyle® 293 Expression Medium (Thermo Fisher) in shaker flasks in a 37° C. humidified CO2 incubator on an orbital shaker rotating at 125 rpm. Cultures were harvested 96 h post-transfection by centrifugation and the secreted HSA-IL-2Rβγc ligand fusion protein was purified from the supernatant by Ni-NTA affinity chromatography.

[1646] Ni-NTA agarose resin was added to the culture supernatant and incubated at room temperature for several hours. The resin was then washed three times with TBS wash buffer (25 mM Tris pH 8.0, 150 mM NaCl, 20 mM imidazole). Bound HSA-IL-2Rβγc ligand fusion protein was eluted from the resin with elution buffer (25 mM Tris pH 8.0, 150 mM NaCl, 250 mM imidazole) followed by buffer exchange to remove imidazole using Zeba® spin columns (Thermo Fisher). Protein was quantified by measuring absorbance at 280 nm using a NanoDrop® spectrophotometer and concentration was determined using calculated extinction coefficients derived from the primary sequence of the protein.

[1647] The amino acid sequences of the IL-2Rβγc ligand fusion proteins used in the experimental examples is provided in FIGS. 20A-20J and 21A-21C.

[1648] The hIgG2 Fc-fragment refers to the Fc region consisting of the CH2 and CH3 domains of the IgG2 heavy chain and the hinge region. The first and second cysteines of the hinge region were replaced with serine to prevent detrimental disulfide bridges. The last amino acid (lysine) of the Fc region was replaced with an alanine for fusion stability. The N-terminus of IgG2 Fc constructs starts with Ala-Pro-Leu (derived from InvivoGen vector).

[1649] The hIgG1v Fc-fragment refers to the Fc region consisting of the CH2 and CH3 domains of the IgG1 heavy chain and the hinge region. The first cysteine of the hinge region was replaced with a serine to prevent detrimental disulfide bridges. The last amino acid (lysine) of the Fc region was replaced with an alanine for fusion stability. Effector silencing mutations P329G, L234A/L235A (LALA) were included in the IgG1v Fc-(BGL21) construct (FP2) (SEQ ID NO: 1213). The N-terminus of the IgG1v Fc construct starts with Ala (derived from InvivoGen vector).

[1650] The hIgG4 Fc-fragment refers to the Fc region consisting of the CH2 and CH3 domains of the IgG4 heavy chain and the hinge region. Effector silencing mutations P329G, S228P/L235E (SPLE) were included in the hIgG4 Fc variant (FP3) (SEQ ID NO: 1214).

[1651] Fc-Knob refers to the Human Hinge Knob Fc IgG1 LALA-dK (decreased effector function and low C-terminal heterogeneity) (L252A, L253A, T384W).

[1652] Fc-Hole refers to the Human Hinge Hole Fc IgG1 LALA-dK (decreased effector function and low C-terminal heterogeneity) (L252A, L253A, T384S, L386A, Y425V).

[1653] The hIgG1 Fc-fragment refers to the Fc region consisting of the CH2 and CH3 domains of the IgG1 heavy chain and the hinge region. The last amino acid (lysine) of the Fc region was replaced with alanine for fusion stability. The construct includes effector silencing mutation N297A.

[1654] The hIgG2 Fc-fragment refers to the Fc region consisting of the CH2 and CH3 domains of the IgG2 heavy chain and the hinge region. The first and second cysteines of the hinge were replaced with serines to prevent detrimental disulfide bridges. The last amino acid (lysine) of the Fc region was replaced with alanine for fusion stability.

[1655] Amino acid sequences of IL-2Rβγc ligand fusion proteins used in the experimental examples are provided in FIGS. 20A-20J.

### Example 15

### STAT5 Phosphorylation in TF-1β Cells with IL-2Rβγc Ligand Fusion Proteins

[1656] IL-2Rβγc ligand (BGL21) was fused to an IgG Fc-fragment consisting of the CH2 and CH3 domains of the heavy chain and hinge regions of human IgG2 (C-terminal fusion SEQ ID NO: 1212; N-terminal fusion SEQ ID NO: 1215) as described in Example 14. IL-2Rβγc ligand (BGL21) was also fused to a heterodimeric Fc-fragment (Knob-into-holes) variant consisting of the CH2 and CH3 domains of the heavy chain and hinge regions of human IgG1. IL-2Rβγc ligand (BGL21) was fused to the C-terminus of the knob-Fc-fragment (SEQ ID NO: 1216) which contains a “knob” mutation (T366W) and effector silencing mutations (L234A/L235A). The construct was co-expressed with a hole-Fc-fragment (SEQ ID NO: 1217), which contains “hole” mutations (T366S, L368A, Y407V) and effector silencing mutations (L234A/L235A), to produce a heterodimeric Fc-fragment with a single copy of IL-2Rβγc ligand (BGL21) at the C-terminus of the fusion protein. In addition to fusions to Fc-fragments, IL-2Rβγc ligand (BGL21) was also fused to the C-terminus of human serum albumin (SEQ ID NO: 1252) as described in Example 14.

[1657] Fusion proteins were incubated with TF-1β cells and STAT5 phosphorylation was measured as a function of concentration using the methods described in Example 3.

[1658] The structure of the IL-2Rβγc ligand fusion proteins is provided in FIGS. 20A-20J and 21A-21C.

[1659] The results are presented in FIG. 12.

### Example 16

### STAT5 Phosphorylation in TF-1β Cells with Different IL-2Rβγc Ligand IgG2 Fc-Fragment Fusion Proteins

[1660] A series of IL-2Rβγc ligands were fused to the C-terminus of an IgG2 Fc-fragment consisting of the CH2 and CH3 domains of the heavy chain and hinge regions of human IgG2 as described in Example 14. The IL-2Rβγc ligands included IL-2Rβ and IL-2Rγc ligands exhibiting various binding affinities to IL-2R that were linked together with a flexible linker (GGGGS)₂ (SEQ ID NO: 9396) between the two peptide sequences.

[1661] Fusion proteins were incubated with TF-1β cells and STAT5 phosphorylation was measured as a function of concentration using the methods described in Example 3.

[1662] The structures of the Fc-IL-2Rβγc ligand fusion proteins evaluated is provided in FIGS. 20 and 23 as SEQ ID NOS: 1212, 1239, 1243, 1244, 1250, and 1251.

[1663] The results are presented in FIG. 13.

### Example 17

### STAT5 Phosphorylation in NK-92 Cells with Fusion Proteins Including an IL-2Rβγc Ligand Bound to the Fc-Fragment of Different IgG Isotypes

[1664] IL-2Rβγc ligand (BGL21) was fused to Fc-fragments consisting of the CH2 and CH3 domains of the heavy chain and hinge regions of three different isotypes of human IgG. In the first construct (FP2; SEQ ID NO: 1213) IL-2Rβγc ligand (BGL21) was fused to the C-terminus of a human IgG1 Fc-fragment variant in which the first cysteine in the hinge region was replaced by a serine to prevent detrimental disulfide bridges and the last amino acid (lysine) was replaced by alanine for fusion stability. Effector silencing mutations were also included in this variant (P329G, L234A/L235A). The second construct (FP1; SEQ ID NO: 1212) IL-2Rβγc ligand (BGL21) was fused to the C-terminus of a human IgG2 Fc-fragment variant in which the first and second cysteines in the hinge region were replaced by serine to prevent detrimental disulfide bridges and the last amino acid (lysine) was replaced by alanine for fusion stability. In a third construct (FP3; SEQ ID NO: 1214) IL-2Rβγc ligand (BGL21) was fused to the C-terminus of a human IgG4 Fc-fragment variant that contained effector silencing mutations (P329G, S228P/L235). Each fusion protein was expressed and purified as described in Example 14.

[1665] Fusion proteins were incubated with TF-1β cells and STAT5 phosphorylation was measured as a function of concentration using the methods described in Example 3.

[1666] The structure of the IgG Fc-IL-2Rβγc ligand fusion proteins (FP1)-(FP3) is provided in FIGS. 20A and 21A-21C and corresponds to SEQ ID NOS: 1212, 1213, and 1214.

[1667] The results are presented in FIG. 14.

### Example 18

### STAT5 Phosphorylation in TF-1β Cells with IL-2Rβγc Ligand IgG2 Fc-Fragment Fusion Proteins Having Different Fc Linkers

[1668] IL-2Rβγc ligand (BGL21) IgG2 Fc-fragment variants containing a series of flexible construct linkers with glycine or glycine/serine repeats, or rigid construct linkers with proline/alanine repeats between the Fc-fragment and the C-terminal IL-2Rβγc ligand (BGL21) were prepared as described in Example 14.

[1669] Fusion proteins were incubated with TF-1β cells and STAT5 phosphorylation was measured as a function of concentration using the methods described in Example 3.

[1670] The structure of the Fc-IL-2Rβγc ligand fusion proteins is provided in FIGS. 20A-20J and 21A-21C and correspond to IL-2Rβγc ligand fusion proteins (FP16)-(FP24) corresponding to SEQ ID NOS: 1227-1235.

[1671] The results are presented in FIG. 15.

### Example 19

### STAT5 Phosphorylation in TF-1β Cells and NK-92 with IL-2Rβγc Ligand IgG2 Fc-Fragment Fusion Proteins Having Different Fc Linkers

[1672] IL-2Rβγc ligand (BGL21) IgG2 Fc-fragment variants that contained a flexible linker consisting of a (GS)₁₀ (SEQ ID NO: 9407) (see FP14; SEQ ID NO: 1225) flexible linker or a rigid linker consisting of (PA)₁₀ (SEQ ID NO: 9428) (see FP15; SEQ ID NO: 1226) between the IgG2 Fc-fragment and the C-terminus of IL-2Rβγc ligand (BGL21) were prepared as described in Example 14.

[1673] The fusion proteins were incubated with TF-1β cells and STAT5 phosphorylation was measured as a function of concentration using the methods described in Example 3. Each fusion protein was also tested in a NK-92 cell proliferation assay using Ki67 staining to quantify cells that proliferated in response to the compounds as described in Example 9.

[1674] The structures of the Fc-IL-2Rβγc ligand fusion proteins are provided in FIGS. 20A-20J and 21A-21C. In FIGS. 21A-21C the amino acid sequence of the parent IL-2Rβ ligand and parent IL-2Rγc ligand are referenced. Each of the IL-2Rβ ligands and each of the IL-2Rγc ligands used in the Fc-IL-2Rγc fusion proteins includes two flanking glycines on each of the N-terminus and the C-terminus of the parent ligand. For example, IL-2Rβγc ligand fusion protein (FP1) having SEQ ID NO: 1212, includes IL-2Rβ ligand having SEQ ID NO: 914, which corresponds to parent IL-2Rβ ligand having SEQ ID NO: 865 (BL4) with glycines on each of the N-terminus and C-terminus, bound to IL-2Rγc ligand having SEQ ID NO: 1052, which corresponds to parent IL-2Rγc ligand having SEQ ID NO: 965 (GL2) with two glycines on each of the N-terminus and C-terminus.

[1675] The results are presented in FIGS. 16A and 16B.

### Example 20

### PD-1 Binding and IL-2 Agonist Activity of Anti-PD-1 Antibody-IL-2Rβγc Ligand (BGL21) Fusion Proteins

[1676] IL-2Rβγc ligand (BGL21) was fused to the C-terminus of the heavy chains of two therapeutic checkpoint inhibitor antibodies that target PD-1 (Pembrolizumab (FP8) (SEQ ID NO: 1219; Cemiplimab (FP10) (SEQ ID NO: 1221) as described for heterodimeric peptide fusions to IgG Fc-fragments in Example 14. The constructs were transiently co-expressed with their corresponding light chain constructs (Pembrolizumab (FP7; SEQ ID NO: 1218); Cemiplimab (FP9; SEQ ID NO: 1220) in HEK-293F cells to produce full IgG IL-2Rβγc ligand (BGL21) fusions.

[1677] Purified proteins were evaluated for binding to PD-1 target protein by ELISA. Recombinant human PD-1 his tagged protein (R&D Systems 8986-PD-100) was dissolved in PBS at 1 μg/mL and directly immobilized in microtiter wells by absorption followed by blocking with PBS/1% BSA. Serial dilutions of Pembrolizumab and Cemiplimab antibodies or the corresponding IL-2Rβγc ligand (BGL21) fusion proteins were added to the wells and incubated for 1 h at 4° C. Wells were then washed with PBS and an anti-human IgG HRP-linked antibody was added to each well and incubated for 1 hour at 4° C. After a final wash TMB substrate solution was added to measure the amount of HRP in each well. Absorbance at 450 nm was read in a microplate reader. The signal that is produced is proportional to the quantity of antibody bound to PD-1 in each well. The result of the binding to PD-1 is shown in FIGS. 17A and 17C.

[1678] Pembrolizumab and Cemiplimab IL-2Rβγc ligand (BGL21) fusion proteins were incubated with TF-1□ cells and STAT5 phosphorylation was measured as a function of concentration using the methods described in Example 3. The results of the STAT5 phosphorylation assay are shown in in FIGS. 17B and 17D, respectively.

[1679] The structure of the Fc-IL-2Rβγc ligand fusion proteins is provided in FIGS. 20A-20J and 21A-21C.

### Example 21

### Synthesis of PEGylated IL-2Rβγc Ligand (BGL21) Construct

[1680] An analog of IL-2Rβγc ligand (BGL21) was prepared as described in Example 1 except instead of acetylating the N-terminal primary amine with acetic anhydride, Fmoc-PEG₁₀-CH₂CH₂—CO₂H (Anaspec, Hayward, Calif.) was added to the N-terminus using a final HATU-mediated coupling step, and the Fmoc-protecting group was removed as described previously. Cleavage from the resin and disulfide formation were performed as described in Example 1 to provide the oxidized peptide with a free N-terminal primary amine. The IL-2Rβγc ligand (BGL21) (1.5 molar equivalents) was mixed with the NHS-ester of a 40 kD branched PEG reagent (1.0 molar equivalent) (NOF Corp., Tokyo, Japan) in dry DMF. After gentle stirring for 15 min at 25° C., DIEA (10 molar equivalents) was added, and the reaction allowed to proceed to completion (approx. 4 h; analysis by analytical C₁₈ reverse phase HPLC). The final product (PEG-8) was purified by C₁₈ reverse phase HPLC, and the structure of the PEGylated peptide was confirmed by MALDI ToF (time of flight) mass spectrometry and reverse phase HPLC.

### Example 22

### Agonist Activity of PEG-IL-2Rβγc Ligand

[1681] The PEG-IL-2Rβγc ligand construct synthesized in Example 21 (PEG-8) was incubated with NK-92 cells and STAT5 phosphorylation was measured as a function of concentration using the methods described in Examples 3 and 4.

[1682] The results are presented in FIG. 18.

### Example 23

### Production Method

[1683] A mammalian cell expression construct was prepared in which the IL-2Rβγc ligand (BGL21) was fused to the C-terminus of a human IgG1 Fc-fragment variant (FP13; SEQ ID NO: 1224). The first cysteine in the hinge region was replaced by a serine to prevent detrimental disulfide bridges and the last amino acid (lysine) was replaced by alanine for fusion stability. An effector silencing mutation was also included in this variant (N297A). A flexible linker (GS)₁₀ (SEQ ID NO: 9407) is located between the Fc-fragment and the IL-2Rβγc ligand (BGL21).

[1684] Additional mammalian cell expression constructs were prepared in which the IL-2Rβγc ligand (BGL21) was fused to the C-terminus of a human IgG2 Fc-fragment variant in which the first and second cysteines in the hinge region were replaced by serine to prevent detrimental disulfide bridges and the last amino acid (lysine) was replaced by glycine for fusion stability. A flexible linker (GS)₁₀ (SEQ ID NO: 9407) (see FP14; SEQ ID NO: 1225) or a rigid linker (PA)₁₀ (SEQ ID NO: 9428) (see FP15; SEQ ID NO: 1226) is located between the Fc-fragment and the IL-2Rβγc ligand (BGL21).

[1685] Expression plasmids were transfected into CHO-K1 cells and stable pools expressing IL-2Rβγc ligand (BGL21) IgG Fc-fragment fusions were selected in antibiotic containing media. Individual clones were isolated from these pools by limiting dilution and tested for high expression of the IL-2Rβγc ligand (BGL21) IgG Fc-fragment fusion proteins. Large scale cultures of high expressing clones were harvested by centrifugation and the secreted fusion proteins were purified from the supernatants using protein A affinity chromatography. Size exclusion chromatography was used to remove high molecular weight impurities.

### Example 24

### pH Selective Screening

[1686] IL-2Rβ and IL-2Rγc ligands were screened with two peptide libraries to identify peptides exhibiting pH-dependent affinity for the respective receptor subunit. The screening approach utilized cycles of binding and elution under various acidic and neutral pH conditions.

[1687] The binding of phage to IL-2Rβ-GPI or IL-2Rγc-GPI was determined using phage ELISA at the two target pH values and the percent change in binding at pH 7.4 relative to binding at pH 6.0 was calculated.

[1688] For pH-dependent phage titration, the ELISA screening protocol described in the preceding paragraph was used with the following differences: (1) all 96-well ELISA plates contained IL-2Rβ-GPI target; or IL-2Rγc-GPI target, and (2) the titration of the phage supernatants was prepared in two different PBT pH buffers; pH 6.0 and pH 7.4.

[1689] Phage titration was performed in a 96-well polypropylene plate using the following procedure. A 3-times dilution of phage in PBT pH 6 buffer and pH 7.4 buffer was prepared. One hundred (100) μL of the diluted phage were transferred to the target-coated assay plate and incubated at 4° C. for 1 h.

[1690] The pH 6.0 wells were washed 3 times with cold PT pH 6.0 and the pH 7.4 wells were washed 2 times with cold PT pH 7.4.

[1691] The bound phage were detected with anti-M13-HRP.

### Example 25

### ELISA Protocol for Biotinylated Peptide pH-Dependent Binding (IL-2Rβ/Fc-Receptor Binding/Multivalent)

[1692] For each peptide to be assayed, sixteen (16) ELISA plate wells were coated with neutravidin (10 μg/mL in PBS pH 7.2) at 50 μL/well. The coated wells were incubated at 25° C. for at least 1 h.

[1693] The neutravidin was removed from each well. Three hundred (300) μL of blocking buffer (1×PBS pH 7.2, 1% BSA) was added to each well of the neutravidin-coated plates. All plates were covered and maintained at 25° C. for 1 h or overnight at 4° C.

[1694] The incubated plates were washed 4 times with PT (1×PBS pH 7.2, 0.05% Tween®20) buffer.

[1695] The biotinylated peptides were diluted to 1 μM in PBT pH 7.2 buffer and 50 μL was added to the appropriate 16 wells (8 for each binding pH). The plates were incubated at 25° C. for at least 1 h.

[1696] Two (2) titrations of IL-2Rβ-Fc protein were prepared in a polypropylene plate starting at 2 μg/mL using PBT pH 6.0 and pH 7.4 and diluting 3-fold.

[1697] The plates were washed 4-times with PT (1×PBS pH 7.2, 0.05% Tween®20) buffer.

[1698] Fifty (50) μL of the IL-2Rβ-Fc protein dilutions were added to the assay plates buffered at pH 6.0 or pH 7.4) and incubated for 1 h at 4° C.

[1699] The incubated plates were washed 3-times with the corresponding pH buffer PT (50 mM PBS pH 6.0, 0.05% Tween®20 or 50 mM PBS pH 7.4, 0.05% Tween®20).

[1700] Fifty (50) μL of goat anti-huIgG-HRP diluted 1:2500 in cold PBT pH 6.0 was added to each well. The plates were then incubated for 1 h at 4° C. The plates were then washed 4 times with cold buffer PT pH 6.0. Fifty (50) μL of TMB was then added to each well, and the wells were incubated for 1-10 min at 25° C. Fifty (50) μL of a “stop” solution was added to each well, and the plates were read at 450 nm.

### Example 26

### STAT5 Phosphorylation in NK-92 Cells with IL-2Rβγc Ligands Having a pH-Biased IL-2Rβ Ligand

[1701] The IL-2R agonist activity of a pH-biased IL-2Rβγc ligand comprising an IL-2Rβ ligand with a pH-biased affinity for IL-2Rβ was evaluated using a STAT5 phosphorylation assay in NK-92 cells.

[1702] The IL-2Rβγc ligand was incubated with NK-92 cells and STAT5 phosphorylation measured as a function of concentration using the methods described in Example 4 where the starvation media was adjusted to either pH 6.0 or pH 7.4.

[1703] The results are presented in FIG. 24.

### Example 27

### Competition ELISA Protocol for IL-2Rβ Ligand pH-Biased Binding

[1704] For each peptide to be assayed, sixteen (16) ELISA plate wells were coated with IL-2Rβ-Fc (50 ng/well) for at least 1 h at 25° C. or overnight at 4° C.

[1705] The IL-2Rβ-Fc was removed from each well. Three hundred (300) μL of blocking buffer (1×PBS pH 7.2, 1% BSA) was added to each well of the IL-2Rβ-Fc-coated plates. All plates were covered and maintained at 25° C. for at least 1 h.

[1706] The incubated plates were washed 3-times with PT (1×PBS pH 7.2, 0.05% Tween®20) buffer.

[1707] A pH-biased IL-2Rβγc ligand having a pH-biased IL-2Rβ ligand was diluted to 2-times final concentration (20 μM) in PBT pH 6.0 and pH 7.2 buffer and 50 μL was added to the appropriate 16 wells (8 for each binding pH). The plates were then incubated at 4° C. for 1 h.

[1708] A biotinylated version of a peptide ligand that is competitive with the test peptide an in which the binding affinity is the same at pH 6.0 and 7.4, was combined with a neutravidin-HRP conjugate for at least 45 min to prepare the peptide-HRP complex, which was then diluted in pH 6.0 or pH 7.4 PBT.

[1709] Without washing, fifty (50) μL of the peptide-HRP complex dilutions were added to the assay plates buffered at pH 6.0 or pH 7.4 and incubated for 1 h at 4° C.

[1710] The incubated plates were washed 3-times with the corresponding pH buffer PT (50 mM PBS pH 6.0, 0.05% Tween®20 or 50 mM PBS pH 7.4, 0.05% Tween®20).

[1711] Fifty (50) μL of TMB (3,3′5,5′-tetramethylbensidine) was then added to each well, and the wells were incubated for from 1 to 15 min at 25° C. Fifty (50) μL of a stop solution was added to each well, and the plates were read at 450 nm. The results are presented in FIG. 25.

### Example 28

### Competitive Binding ELISA with Phage Tracer

[1712] Competitive binding assays were performed to characterize the IL-2R binding site for IL-2Rβ ligands, IL-2Rγc ligands, and IL-2Rβγc ligands.

[1713] For IL-2Rβ ligands, representative phage clones displaying peptides from IL-2Rβ ligand families were bound to the extracellular domain (ECD) of the IL-2Rβ subunit immobilized in microtiter wells as in Example 27.

[1714] In this example, IL-2R ligands were diluted to 2-times final assay concentration in PBT (1×PBS pH 7.2, 0.5% Bovine Serum Albumin, 0.05% Tween®20) and serially diluted. Fifty (50) μL was added to the appropriate wells. The plates were then incubated at 4° C. for 1 hr.

[1715] Without washing, fifty (50) μL of representative phage were added to the assay wells (phage tracer). The plates were then incubated at 4° C. for 45 min.

[1716] The incubated plates were washed 3-times with PT (50 mM PBS pH 7.4, 0.05% Tween®20).

[1717] The bound phage were detected with fifty (50) ul of anti-M13-HRP (SinoBiological #11973-MM05T-H) at 0.22 μg per μL. The plates were then incubated at 4° C. for 1 hr. Then washed as described above.

[1718] Fifty (50) μL of TMB (3,3′5,5′-tetramethylbensidine) was then added to each well, and the wells were incubated for 1 to 15 min at 25° C. Fifty (50) μL of a stop solution was added to each well, and the plates were read at 450 nm.

[1719] Phage binding was conducted in the presence and absence of synthetic test peptides to determine if phage peptides and test peptides competed for binding to the same sites on IL-2Rβ. Synthetic test peptides were selected to represent peptides from IL-2Rβ ligand families, as well as positive and negative control peptides. IL-2Rβ ligand family sequences and the specific IL-2Rβ ligands evaluated are provided in Table 16.

TABLE 16
IL-2Rβ ligand families and ligands.

| | Specific | | | | | | | | | | | | | | |
|---|---|---|---|---|---|---|---|---|---|---|---|---|---|---|---|
| IL-2Rβ | IL-2Rβ | | | | | | | | | | | | | | |
| Ligand Family | SEQ ID NO: | Peptide Sequence | | | | | | | | | | | | | |
| 1 | 58 | Y | D | C | R | I | A | Q | V | G | E | L | C | D | L |
| 2A | 169 | N | M | C | L | V | G | D | D | Y | W | P | S | C | I |
| 2A | 170 | Q | I | C | D | V | G | Q | W | W | P | D | C | Q | V |
| 2B | 83 | C | C | Y | Q | A | M | V | G | D | L | C | D | F | C |
| 2C | 1034 | C | G | M | A | I | G | D | L | C | M | W | T | | |
| 2C | 1042 | R | W | G | D | V | G | D | L | L | M | P | L | | |
| 4 | 1044 | R | S | C | Y | Y | K | R | P | R | L | W | C | S | E |
| IL-2Rγc Ligand | 224 | D | C | S | M | W | E | G | V | E | L | C | W | | |

[1720] The IL-2Rβ ligands bound to the IL-2Rβ subunit with an IC₅₀ of less than 10 μM and bound to the IL-2Rγc subunit with an IC₅₀ of greater than 100 μM.

[1721] Phage binding to the immobilized IL-2Rβ ECD was detected by staining with antibody against phage coat proteins (anti-phage Ab), staining with labeled secondary antibody against the anti-phage Ab, and scored by reading OD in the microtiter plate optical reader.

[1722] The ELISA signal for each phage binding in the presence and absence of the test peptides was compared to determine which synthetic peptides competed with which phage peptides for binding to the IL-2Rβ subunit. The peptide pairs that exhibited competitive binding (i.e., cross inhibition) were considered to bind at the same functional site on the IL-2 receptor. The results are presented in Table 17.

TABLE 17
Binding of IL-2Rβ ligands to IL-2R.

| | | Phage Clone | | | | |
|---|---|---|---|---|---|---|
| | | IL-2Rβ Ligand | | | | |
| | | SEQ ID NO: | | | | |
| IL-2Rβ Ligand | | 58 | 170 | 83 | 1034 | 1044 |
| SEQ ID NO: | IL-2β Family | 1 | 2A | 2B | 2C | 4 |
| 58 | 1 | +¹ | + | + | + | − |
| 169 | 2A | + | + | + | + | − |
| 1042 | 2C | + | + | + | + | − |
| 1044 | 4 | −² | − | − | − | + |
| 224 | IL-2Rγc Ligand | − | − | − | − | − |

¹IL-2Rβ ligand competes with phage binding.
²IL-2Rβ ligand does not compete with phage binding.

[1723] The IL-2Rβ ligands did not bind competitively to the binding site of the IL-2Rβ subunit with IL-2.

[1724] A similar study was performed to evaluate the binding of IL-2Rγc ligands. IL-2Rγc ligand family sequences and the specific IL-2Rγc ligands evaluated are provided in Table 18.

TABLE 18
IL-2Rγc ligand families and ligands.

| | Specific | | | | | | | | | | | | | | | |
|---|---|---|---|---|---|---|---|---|---|---|---|---|---|---|---|---|
| IL-2Rγc | IL-2Rγc | | | | | | | | | | | | | | | |
| Ligand Family | SEQ ID NO: | Peptide Sequence | | | | | | | | | | | | | | |
| 1A | 198 | K | V | C | E | M | W | G | G | V | L | L | C | W | N | |
| 1A | 202 | R | T | C | T | E | W | E | N | V | V | L | C | W | V | |
| 1B | 224 | D | C | S | M | W | E | G | V | E | L | C | W | | | |
| 2 | 236 | M | C | W | L | E | W | G | E | W | V | G | S | C | L | |
| 3 | 248 | D | L | S | D | L | S | T | F | W | L | S | Q | | | |
| 4 | 266 | C | P | S | M | L | Q | G | P | E | R | T | W | V | C | |
| 5 | 1032 | S | L | L | K | C | Y | N | A | S | T | C | A | S | V | F |
| IL-2Rβ Ligand | 58 | Y | D | C | R | I | A | Q | V | G | E | L | C | D | L | |

[1725] The IL-2Rγc ligands bound to the IL-2Rγc subunit with an IC₅₀ of less than 10 μM and bound to the IL-2Rβ subunit with an IC₅₀ of greater than 100 μM.

[1726] The results of the competition binding assay are presented in Table 19.

TABLE 19
Binding of IL-2Rγc ligands to IL-2R.

| | | Phage Clone | | | | | |
|---|---|---|---|---|---|---|---|
| IL-2Rγc | | IL-2Rγc Ligand SEQ ID NO: | | | | | |
| Ligand | IL-2Rγc | 198 | 224 | 236 | 248 | 266 | 1032 |
| SEQ ID NO: | Family | 1A | 1B | 2 | 3 | 4 | 5 |
| 202 | 1A | +¹ | + | + | + | + | − |
| 224 | 1B | + | + | + | + | + | − |
| 236 | 2 | + | + | + | + | + | − |
| 248 | 3 | + | + | + | + | + | − |
| 1032 | 5 | −² | − | − | − | − | + |
| 58 | IL-2Rβ Ligand | − | − | − | − | − | − |

¹IL-2Rγc ligand competes with phage binding.
²IL-2Rγc ligand does not compete with phage binding.

### Example 29

### Agonist Activity of PEG-IL-2Rβγc Ligand Constructs

[1727] PEG-IL-2Rβγc ligand constructs were synthesized as described in Example 21. The structures of the PEG-IL-2Rβγc ligand constructs is shown in FIGS. 27-33. The IL-2Rβγc ligand used for each of the constructs had SEQ ID NO: 1263. The PEG constructs were incubated with NK-92 cells and STAT5 phosphorylation was measured as a function of concentration using the methods described in Examples 3 and 4, respectively.

[1728] The results are presented in Table 20.

TABLE 20
Agonist activity of PEG-IL-2Rβγc ligand constructs.

| | PEG | | | | | | | | EC50 | |
|---|---|---|---|---|---|---|---|---|---|---|
| | attachment | PEG | PEG/peptide | PEG | IL-2Rβ | | IL-2Rγc | | (STAT5, | |
| Construct | terminus | size | linker | structure | IC50 | | IC50 | | NK92) | |
| PEG-1 | N— | 40 kD | ¹PEG10 | branched | 31 | nM | 26 | nM | 5.8 | nM |
| PEG-2 | C— | 40 kD | ¹PEG4 | branched | 8 | nM | 690 | nM | 273 | nM |
| PEG-3 | N— | 40 kD | (AP)6 | branched | 14 | nM | 4.3 | nM | 2.3 | nM |
| | | | (SEQ ID | | | | | | | |
| | | | NO: 9432) | | | | | | | |
| PEG-4 | C— | 40 kD | ¹PEG10 | branched | 8.5 | nM | 3.7 | nM | 24 | nM |
| PEG-5 | N— | 20 kD | ¹PEG20 | linear | 33 | nM | 4.1 | nM | 1.0 | nM |
| PEG-6 | N— | 40 kD | ¹PEG20 | linear | 17 | nM | 3.4 | nM | 1.6 | nM |
| PEG-7 | N— | 40 kD | ¹PEG20 | branched | 3.4 | nM | 1.7 | nM | 8.3 | nM |

¹Incorporated as Fmoc-NH-(PEGₙ)-CH2CH2—COOH, where n = 4, 10, or 20.

### Example 30

### IL-2Rβγc PEG-Peptide Agonist PK Analysis in CD-1 Mice

[1729] A pharmacokinetic study of an IL-2Rβγc PEG-peptide agonist was performed in CD-1 male mice. An IL-2Rβγc PEG-peptide agonist (PEG-6) was administered intravenously with a single dose of 1 mg/kg to each mouse (n=5). Blood samples were collected at 0 h (pre-dose), 1, 2, 6, 24, 48, 72 and 96 h post-dosing into serum separator vials. Samples were centrifuged at 10,000×g for 5 min at 4° C. and the serum transferred to a new tube. Samples were frozen and stored at −80° C. prior to testing.

[1730] The TF-1β STAT5 phosphorylation bioassay as described in Example 3 was used to quantify the amount of PEG-6 present in each of the serum samples. Three-fold serial dilutions of each serum sample or a compound reference standard in starvation media were added to the cells and incubated for 30 mins with the cells. Cells extracts were prepared and the quantity of phosphorylated STAT5 was determined as described in Example 3. The PEG-6 concentration in each serum sample was calculated using a standard curve generated from the reference standard.

[1731] The results are presented in FIG. 26.

### Example 31

### Phage Display pIII Library Panning Against Fc-Receptor Fusions on Magnetic Beads (Acid Elution) Library Panning Procedure

[1732] The following protocol or similar protocol was used to screen peptides for binding to the hu-IL-21213 and the hu-IL-2Rγc subunits and for some peptides to the cyno-IL-2Rβ and the cyno-IL-2Rγc subunits.

[1733] Fifty (50) μL of Protein G Dynabeads® (Invitrogen) was used for each library sample. After resuspending the stock bottle, the desired volume of beads was transferred to a sterile microfuge tube and applied to the magnet.

[1734] With the beads on a magnet, the supernatant was removed, and the beads were washed with 1 mL of PT buffer (1×PBS, 0.05% Tween®20).

[1735] The supernatant was removed and 1 mL of PBS+1% BSA+0.05% Tween®20 was added and mixed at 25° C. for at least 1 hour to block the beads.

[1736] A tube was applied to the magnet and the blocking solution was removed. For each library to be tested, 5 μg of a Fc-fused receptor of interest was added to each library sample for each round to bring the total volume to at least 400 μL. The samples were mixed at 25° C. for at least 1 h. The sample was applied to the magnet and the supernatant was removed.

[1737] Two-hundred 200 μL of PT buffer was added for each 50 μL of bead. The sample was thoroughly mixed and 200 μL aliquots were transferred into tubes that were pre-labeled for each library to be screened. An additional 500 μL of PT was added to each tube, the samples mixed, and then applied to the magnet. A total of 700 μL/tube was used for the wash.

[1738] One (1) mL aliquots of the libraries removed from the −20° C. freezer. One hundred (100 μL of 10× BT buffer (5% BSA, 0.5% Tween®20 in 1×PBS) was added to each tube and vortexed. The library samples were transferred to pre-labeled tubes containing beads. The samples were then incubated at 4° C. on the rotator for at least 2 h. For the additional rounds of screening, 1 mL aliquots of the amplification from the previous round from each library was used. The beads were recovered with the magnet and the phage solution removed. The beads were washed 2× with 1 mL of PT buffer. Five hundred (500) μL of PT buffer was added and the suspension was transferred to a clean tube. The beads were recovered on the magnet and the final wash removed.

[1739] Four-hundred seventy-five (475) μL of phage elution buffer was added to each well (0.2 M glycine-HCL, pH 2.2, 1.0 mg/mL BSA). The samples were incubated at 25° C. for 10 min on the rotator. The beads were recovered on the magnet and the eluted phage transferred to a clean tube.

[1740] Twenty-five (25) μL of neutralization buffer (2 M Tris Base) was added to the 475 μL of elution. The neutralized samples were maintained at 4° C. until the TG1 cells were ready amplification. The samples were stored at −20° C. after screening. Fifty (50) μL (about 10% of the total volume) was transferred to a 1.5 mL microfuge tube and store at −20° C. for use in deep sequencing.

### Example 32

### TG1 Culture and Library Amplification

[1741] A fresh TG1 (or OmniMax) culture was grown for about 1 to 1.5 h after adding the libraries to the beads. 2X-YT medium (10 mL) was placed into a 50 mL Falcon® tube. Two hundred (200) μL of the TG1 overnight was added to the falcon tube. 2X-YT medium (600 μL) was placed in a cuvette for OD600 blank. The culture was grown at 250 rpm and 37° C., taking the first OD measurement after 60 min. The TG1 cells should be in log phase at the time of use with an OD600 of 0.5-0.7.

[1742] Eluted phage (400 μL to 450 μL) was added to 1.0 mL of the TG1 cells at an OD600 of 0.5-0.7 in a 50 mL Falcon® tube. The phage and TG1 cells were incubated at 37° C. for 30 min without shaking. About 50 μL to 100 μL was set aside for titering and characterization.

[1743] 2YT medium (10.5 mL) was added to 12 μL of carbenicillin (carb) (100 mg/mL to make 100 μg/mL) and 24 μL of 50% glucose (to make 0.1% glucose) and the cells incubated while shaking at 37° C. at 250 rpm for 1 h.

[1744] M13K07 helper phage (5×10¹⁰ pfu, 24 μL of the stock, 2×10¹² pfu/mL) was then added and swirled to mix. The phage and cells were incubated at 37° C. for 30 min without shaking.

[1745] Kanamycin was diluted to 3 mg/mL and arabinose to 2.4% in 2YT medium/Carbenicillin-100/0.1% glucose and 100 μL was added to each amplification. The mixture was incubated overnight at 37° C. and 250 rpm.

[1746] The culture was transferred to a 50 mL high-speed VWR centrifuge tube and centrifuged at 8,000 g for 15 min at 4° C. in a JSP-F50C centrifuge to pellet the cells.

[1747] The supernatant was transferred to a 50 mL high-speed VWR centrifuge tube and 0.2 volumes of PEG/NaCl (multiply the volume by 0.25 mL to 3 mL PEG/NaCl for 12 mL amplification) was added, mixed, and incubated on ice for 30 minutes.

[1748] The cells were then centrifuge at 10,500 g for 15 min at 4° C. in a JSP-F50C centrifuge. The supernatant was removed, and the phage pellet was resuspended in a total of 1 mL of PBT (1×PBS, 0.05% Tween®20, 0.5% BSA) by pipetting.

[1749] The sample was transferred to an Eppendorf tube, vortexed, and centrifuged at 12,000 rpm for 30 sec. The supernatant was transferred to a clean Eppendorf tube and stored at 4° C. This amplified phage sample (250-500 μL) was used for the next round of screening.

### Example 33

### Preparation of Cultures from Individual Colonies

[1750] Ninety-six (96) wells of a deep well plate were filled with 1 mL of 2YT broth/Ampicillin-50/0.1% glucose. Ninety-six (96) colonies were placed into the wells using P20 tips. The tips were left in the wells to mark the position. The tips were removed using a multi-channel pipette after the entire plate was completed. The plate was covered with a breathable film.

[1751] The inoculated plate(s) were incubated in a shaker at 37° C. until the cultures became turbid, typically within 4 h at 250 rpm.

[1752] The plate(s) was removed from the incubator and 50 μL of the culture from each well was removed to another deep well block designated as the “Archive Block” containing 1 mL of 2YT broth/Ampicillin-50/0.1% glucose. The plate(s) were covered with a breathable film and incubated overnight at 37° C. and 250 rpm.

[1753] After incubating overnight, M13K07 helper phage was added to 2×10¹⁰ pfu/mL in 2YT broth/Ampicillin-50/0.1% glucose (make 6.0 mL per block). Fifty (50) μL of the diluted M13K07 was added to each culture well in the deep well block. The deep well block was covered with breathable film and incubated for 30 min at 37° C. and 250 rpm.

[1754] Kanamycin was diluted to 0.5 mg/mL and arabinose to 0.4% in 2YT broth/Ampicillin-50/0.1% glucose (make 6.0 mL per block) and 50 μL was added to each well. The plate was covered with a breathable film and incubated overnight at 37° C. and 250 rpm.

[1755] The “Archive Block” culture was removed from the incubator and 50 μL was transferred to a 96-well plate containing 50 μL of 50% glycerol. The plate was sealed with foil and stored at −80° C. The remaining culture in the block was covered with a foil seal and stored at 4° C.

[1756] The block was centrifuged and inoculated with M13K07 at 4000 rpm for 15 min. While avoiding the bacterial pellet, 850 μL of the phage supernatant was transferred to a fresh deep well plate, covered with a foil seal, and stored at 4° C.

### Example 34

### Competition Binding ELISA with Peptide Tracers

[1757] Binding of Fc fusions to IL-2Rβ and IL-2Rγc were measured using a competition binding ELISA with biotinylated peptide/NeutrAvidin-HRP tracer. ELISA plate was prepared as described in Example 27.

[1758] IL-2R ligands were prepared as described in Example 28.

[1759] The receptor Fc-fusion was removed from each well. Three hundred (300) μL of blocking buffer (1×PBS, 1% BSA) was added to each well of a receptor-coated plate.

[1760] The plate was washed 4 times with PT (1×PBS, 0.05% Tween® 20) buffer. Fifty (50) μL of IL-2R ligands serially diluted in PBT was added to appropriate wells then incubated at 4° C. for 1 hr.

[1761] In this example, biotinylated peptide/NeutrAvidin-HRP (ThermoFisher Cat #31030) precomplexes were made using C-terminal biotinylated forms of the IL-2Rβ ligands and of the IL-2Rγc ligands (hu-IL-2Rβ peptide SEQ ID NO: 915, cyno-IL-2Rβ peptide SEQ ID NO: 2941, and IL-2Rγc peptide having SEQ ID NO: 1614 (GGVVCQDWEGVELCWQGGR). Bn-peptide was combined with NeutrAvidin (NA)-HRP (1 μM bn-peptide, 7.5 fold dilution of NA-HRP into PBS) and incubated at 4° C. for at least 45 min to prepare the peptide-HRP precomplex tracer.

[1762] At the appropriate time, the precomplexed bn-peptide/NA-HRP tracer was diluted to 2-fold its predetermined binding EC80 (typically 30 to 10 nM) without washing. fifty (50) μL of bn-peptide/NA-HRP tracer was added to each well and incubated at 4° C. for 45 mins.

[1763] The plates were then washed 4 times with cold PT. Fifty (50) μL of TMB was then added to each well, and the wells were incubated for 1-10 min at 25° C. Fifty (50) μL of a “stop” solution was added and the plate read at 450 nm.

### Example 35

### Evaluation of Peptide Heterodimer Ability to Dimerize IL-2Rβγc and to Activate IL-2 Responsive Cells

[1764] Following the identification of peptidyl ligands that exhibit IL-2Rβ and IL-2Rγc binding activity, compounds will be identified that exhibit IL-2R agonist activity. This will involve assessing the ability of the peptide to dimerize the IL-2Rβγc subunits and to signal in cell-based assays. Dimerization is a necessary, but not sufficient, step in the activation of receptor signaling. To assess agonist activity in cell-based assays, IL-2 responsive cell lines will be tested for an indicator of IL-2 signaling, phosphorylation of STAT5. Compounds that exhibit IL-2Rβγc agonist activity in these cell lines will then be tested in primary human peripheral blood mononuclear cells (PBMC) for IL-2R agonism, and for the desired selectivity favoring activation of cell types expressing IL-2Rβγc subunits, but with low or no IL-2Rα (CD25) subunit expression.

[1765] Dimerization potential will be assessed using a β-Gal complementation system in which a portion of the intracellular domains of each respective IL-2 receptor subunit is replaced with functionally complementary fragments of β-Gal, which regain catalytic activity when brought into sufficiently proximity. Cells expressing these constructs generate β-Gal activity, with an ED50 of about 26 nM, when treated with IL-2 (see DiscoverX product specifications). All synthetic, potentially agonist, peptides will be tested using this assay.

[1766] Candidate compounds will be scored for induction of STAT5 phosphorylation in two cell lines: (1) CTLL-2 cells, a mouse cytotoxic T-lymphocyte line that expresses all three IL-2 receptor subunits, and which are responsive to IL-2Rβγc-biased variants as well as wild type IL-2; and (2) TF-1β cells which are derived from the human erythroleukemia line TF-1, and naturally express only IL-2Rγc, and are engineered to be IL-2 responsive by transfection of IL-2Rβ. TF-1β will be constructed and IL-2R subunit expression levels in both cell lines will be verified by QPCR and FACS analysis.

[1767] Compounds will be tested in both cell lines. Dose response assays will be conducted to determine EC50 of the test compounds and to compare the test compounds with IL-2 as an indicator of IL-2Rβγc receptor bias. To further characterize subunit bias, a parallel assay will be run in the presence of a neutralizing antibody to the human IL-2Rβ subunit.

[1768] As a control to confirm that positive compounds are acting through stimulation of the IL-2 receptor, the assay will also be done with cells treated with neutralizing anti-huIL-2Rβ antibody. To determine that compound activity is not due to contamination with cytokines, test compounds will be treated with neutralizing antibodies (R&D Systems) against the natural IL-2Rβγc agonists, IL-2 and IL-15.

[1769] Compounds exhibiting IL-2R agonist activity in the cell lines will be tested on human primary immune cells, PBMCs, collected from individual donors (commercially available from Lonza), and in some cases on purified CD4+ cells (Lonza). A substantial fraction of PBMCs from normal donors are responsive to IL-2. To assess IL-2 agonist activity of the test compounds, cells will be exposed to the compounds or IL-2 and scored for STAT5 phosphorylation by western blot analysis. As a control to confirm that positive compounds are acting through stimulation of the IL-2 receptor, the assay will also be done with cells treated with neutralizing anti-huRβ antibody.

[1770] Those compounds exhibiting STAT5 activation of PBMCs will be subjected to a follow-on assay designed to assess subunit bias of the compounds compared to IL-2. This assay will involve determining a dose response of the test compounds and IL-2 (1 to 1000 IU) over 30 min, scored by a FACS-based protocol allowing detection of both intracellular pSTAT5 as an indicator of IL-2R activation, and cell surface CD25, the IL-2Rβ subunit. Cells expressing the three IL-2R subunits, IL-2Rβγc, bind IL-2 with very high affinity (about 10 pM) and are therefore sensitive to low concentrations of IL-2; whereas cells expressing only IL-2Rβγc (about 1 nM affinity) require exposure to substantially higher IL-2 levels for activation. Because compounds provided by the present disclosure are selected for binding to the IL-2Rβ and IL-2Rγc subunits, but not to IL-2Rα, the potency of the compounds is expected to be uncorrelated with the level of expression of IL-2Rα on cells; and comparison of response profiles of cells treated with compounds provided by the present disclosure or treated with IL-2 should reveal any bias.

### Example 36

### Identified Peptides

[1771] Stochastic libraries with each library containing approximately 10¹⁰ independent recombinants, with each clone potentially displaying a unique peptide sequence have been screened for binding to human IL-2Rβ or to human I1-2Rγc subunits.

### Example 37

### Preparation of NK-92 Cells for Testing STAT5 Activation of Hu-IL-2R

[1772] NK-92 cells were seeded in a 24-well plate at 4×10⁵ cells, in 1 mL starvation medium (SM), and incubated overnight at 37° C., 5% CO2. The starvation medium contained RPMI 1640+20% FBS+2 mM L-glutamine+1 mM NaPyr+10 mM HEPES+0.1 mM BME (no rhu-IL-2 supplement).

[1773] Treatment mixtures were of 1 μg/mL Anti-hu-IL-2 neutralizing antibody (0.2 mg/mL stock) or goat IgG control (1 mg/mL stock) were prepared.

[1774] The treatment mixtures and the antibody mix were added to the cells for 30 min at 37° C., 5% CO2. Each sample was then transferred to a 1.5 mL microfuge tube and spun down at 1,500 RPM for 5 minutes. The cells were washed in 1 mL PBS and centrifuged again.

[1775] A phosphatase and protease inhibitor cocktail (Thermo #78442) were added to mPER buffer at a 1:100 dilution. After the cells were pelleted, 50 μL of mPER buffer was added to each sample and pipetted repeatedly to homogenize.

[1776] The lysates were centrifuged at 14,000 RPM for 5 min at RT. The supernatants were transferred to clean tubes and stored frozen at −80° C.

[1777] The human IL-2 Antibody (goat IgG) was obtained from R&D Systems No. AF-202-NA; the normal goat IgG Control was obtained from R&D Systems No. AB-108-C; the Anti-STAT5 Antibody (rabbit), the Cell Signaling No. 94205S, the Anti-pSTAT5 Antibody (rabbit), the Cell Signaling No. 4322S, and the Goat anti-rabbit IgG-HRP was obtained from Jackson Immunoresearch No. 111-035-144.

[1778] The antibodies, treatment and working stock prep for each of the samples is provided in Table 21. Compounds A and B are IL-2Rβγc agonists provided by the present disclosure.

TABLE 21
STAT5 activation samples in NK-92 cells.

| | | Vol | | Vol | |
|---|---|---|---|---|---|
| No. | Antibody | (μL) | Treatment | (μL) | Working stock prep |
| 1 | Anti-hu-IL-2 IgG | 5 | A 10 μM | 100 | 100 μM (1:100 of 10 mM stock in SM) |
| 2 | Anti-hu-IL-2 IgG | 5 | A 1 μM | 10 | 100 μM (1:100 of 10 mM stock in SM) |
| 3 | Anti-hu-IL-2 IgG | 5 | A 0.1 μM | 1 | 100 μM (1:100 of 10 mM stock in SM) |
| 4 | Anti-hu-IL-2 IgG | 5 | B 10 μM | 100 | 100 μM (1:100 of 10 mM stock in SM) |
| 5 | Anti-hu-IL-2 IgG | 5 | B 1 μM | 10 | 100 μM (1:100 of 10 mM stock in SM) |
| 6 | Anti-hu-IL-2 IgG | 5 | B 0.1 μM | 1 | 100 μM (1:100 of 10 mM stock in SM) |
| 7 | Anti-hu-IL-2 IgG | 5 | rh-IL-2 1 ng/mL | 10 | 100 ng/mL (1:1000 of 100 μg/mL stock in |
| | | | | | SM) |
| 8 | Anti-hu-IL-2 IgG | 5 | rhu-IL-2 0.1 ng/mL | 1 | 100 ng/mL (1:1000 of 100 μg/mL stock in |
| | | | | | SM) |
| 9 | Anti-hu-IL-2 IgG | 5 | rhu-IL-2 0.1 ng/mL + | 1 | 100 ng/mL (1:1000 of 100 μg/mL stock in SM) |
| | | | 1% DMSO | | +10 μL DMSO |
| 10 | Anti-hu-IL-2 IgG | 5 | Starvation Medium | N/A | N/A |
| | | | (SM) | | |
| 11 | Goat IgG control | 1 | A 10 μM | 100 | 100 μM (1:100 of 10 mM stock in SM) |
| 12 | Goat IgG control | 1 | A 1 μM | 10 | 100 μM (1:100 of 10 mM stock in SM) |
| 13 | Goat IgG control | 1 | A 0.1 μM | 1 | 100 μM (1:100 of 10 mM stock in SM) |
| 14 | Goat IgG control | 1 | B 10 μM | 100 | 100 μM (1:100 of 10 mM stock in SM) |
| 15 | Goat IgG control | 1 | B 1 μM | 10 | 100 μM (1:100 of 10 mM stock in SM) |
| 16 | Goat IgG control | 1 | B 0.1 μM | 1 | 100 μM (1:100 of 10 mM stock in SM) |
| 17 | Goat IgG control | 1 | rh-IL-2 1 ng/mL | 10 | 100 ng/mL (1:1000 of 100 μg/mL stock in SM) |
| 18 | Goat IgG control | 1 | rhu-IL-2 0.1 ng/mL | 1 | 100 ng/mL (1:1000 of 100 μg/mL stock in SM) |
| 19 | Goat IgG control | 1 | rhu-IL-2 0.1 ng/mL + | 1 | 100 ng/mL (1:1000 of 100 μg/mL stock in |
| | | | 1% DMSO | | SM) + 10 μL DMSO |
| 20 | Goat IgG control | 1 | Starvation Medium | N/A | N/A |
| | | | (SM) | | |

[1779] The samples were applied to a Western Blot. The treatment reagents included Anti-STAT5 Antibody (rabbit), Cell Signaling No. 94205S; Anti-pSTAT5 Antibody (rabbit), Cell Signaling No. 4322S; and Goat anti-rabbit IgG-HRP, Jackson Immunoresearch No. 111-035-144.

[1780] To perform the assay, NK-92 cells were plated in starvation medium at 20,000 cells/well in a 96-well plate. Treatment was added to each well in 3-fold serial dilutions with the peptides having maximum concentration of 10 μM and rhL-2 having a maximum concentration of 6.67 nM. The cells were then incubated at 37° C. for 48 h. CellTiter-Glo® reagent was added and the cells incubated for 10 min at 25° C. before luminescence reading.

### Example 38

### Preparation of TF-1β and TF-1 Cells for Testing STAT5 Activation of Hu-IL-2R

[1781] TF-1β and TF-1 parental cells were counted. The cells were collected and 2.5×10⁶ cells pelleted at 200×g for 5 minutes. The pelleted cells were washed with 25 mL RPMI with no additives.

[1782] The TF-1β and TF-1 parental cells were seeded at 5×10⁵ cells in a T25 flask, in 5 mL starvation medium (SM), and incubated overnight with the flask upright at 37° C. under 5% CO₂.

[1783] The TF-1β and TF-1 parental cells were counted, and the viability was determined. If necessary, the cells were diluted to 5×10⁵ cells/mL in SM and then 1 mL of the suspension was added to 6 wells/cell line of a 24-well dish and incubate at 37° C. under 5% CO₂.

[1784] The treatments were added to the cells for 30 min at 37° C. under 5% CO2. The treated cells were transferred to a 1.5 mL microfuge tube and spun down at 1,500 RPM for 5 min. The cells were washed in 1 mL PBS, centrifuged again, and the supernatant aspirated. The treatment reagents included Anti-STAT5 Antibody (rabbit), Cell Signaling No. 94205S; Anti-pSTAT5 Antibody (rabbit), Cell Signaling No. 4322S; and Goat anti-rabbit IgG-HRP, Jackson Immunoresearch No. 111-035-144.

[1785] A phosphatase and protease inhibitor cocktail (Thermo No. 78442) were added to mPER buffer at 1:100 dilution. After the cells were pelleted, add 50 μL of mPER buffer was added to each sample and the mixture repeatedly pipetted to homogenize.

[1786] The lysates were centrifuged at 14,000 RPM for 5 min at 25° C. The supernatants were transferred to clean tubes and stored frozen at −80° C.

[1787] The antibodies, treatment and working stock prep for each of the samples is provided in Table 22.

TABLE 22
STAT5 activation samples in TF-1β and TF-1 cells.

| | Cell | | | |
|---|---|---|---|---|
| No. | line | Treatment | (μL) | Working stock prep |
| 1 | TF-1β | A 10 μM | 100 | 100 μM (1:100 of 10 mM stock in SM) |
| 2 | TF-1β | B 10 μM | 100 | 100 μM (1:100 of 10 mM stock in SM) |
| 3 | TF-1β | C 10 μM | 100 | 100 μM (1:100 of 10 mM stock in SM) |
| 4 | TF-1β | rhu-IL-2 | 10 | 100 ng/mL (1:1000 of 100 μg/mL stock |
| | | 1 ng/mL | | in SM) |
| 5 | TF-1β | Starvation | 100 | N/A |
| | | Medium¹ (SM) | | |
| 6 | TF-1 | A 10 μM | 100 | 100 μM (1:100 of 10 mM stock in SM) |
| 7 | TF-1 | B 10 μM | 100 | 100 μM (1:100 of 10 mM stock in SM) |
| 8 | TF-1 | C 10 μM | 100 | 100 μM (1:100 of 10 mM stock in SM) |
| 9 | TF-1 | rhu-IL-2 | 10 | 100 ng/mL (1:1000 of 100 μg/mL stock |
| | | 1 ng/mL | | in SM) |
| 10 | TF-1 | Starvation | 100 | N/A |
| | | Medium¹ (SM) | | |

¹Starvation medium: RPMI 1640, 2.5 g/L glucose (4.5 g/L total), 5% FBS, 2 mM L-glutamine, 1 mM NaPyr, and 10 mM HEPES (no GM-CSF supplement).

### Example 39

### Competitive Binding of IL-2Rβγc Ligands to Hu-IL-2R and Cyno-IL-2R Subunits

[1788] The competitive binding of various IL-2Rβγc ligands to hu-IL-2R and cyno-IL-2R subunits was determined using the competition binding ELISA assay described in Example 34.

[1789] IL-2Rβγc ligands having SEQ ID NOS: 4170-4185 and having the structure of BGL22-BGL24 bind to the hu-IL-2Rβ subunit, the cyno-IL-2Rβ subunit, the hu-IL-2Rγc subunit and to the cyno-IL-2Rγc subunit with an IC50 less than 100 μM or less than 10 μM.

### Example 40

### STAT5 Phosphorylation

[1790] IL-2Rβγc ligands and IL-2Rβγc ligand constructs were evaluated for induction of STAT5 phosphorylation in TF-1β cells. TF-1β cells were derived from the growth factor-dependent human erythroleukemia cell line TF-1 (ATCC No. CRL-2003), which naturally expresses Rγc but not IL-2Rβ. The cells were engineered to be IL-2 responsive by transfection with human full-length IL-2Rβ. A cell line expressing higher levels of IL-2Rβ was selected by growth in IL-2, and both IL-2Rβ and IL-2Rγc subunit expression levels were verified by qPCR and FACS analysis.

[1791] To test compounds for induction of STAT5 phosphorylation, TF-1β cells were starved overnight at 5×10⁵ cells/mL in starvation medium (RPMI 1640+2.5 g/L glucose+5% FBS+2 mM L-glutamine+1 mM NaPyr+10 mM HEPES with no GM-CSF or rhIL-2 supplement) in T75 flasks. The following day, cells were plated in 96-well V-bottom plates at 2×10⁵ cells/well. Three-fold serial dilutions of IL-2Rβγc ligands or IL-2 in starvation media were added to the cells and incubated for 30 min at 37° C. Cell extracts were prepared by adding a mixture of 10× Cell Lysis Buffer (Cell Signaling Technology No. 9803) and 1× HALT Phosphatase and Protease Inhibitor Cocktail (Thermo Fisher No. 78442) directly to the wells. The plates were agitated at 25° C. for 5 min to prepare cell extracts for immediate use or stored at −80° C. Detection of pSTAT5 was performed using a PathScan® Phospho-Stat5 (Tyr694) Sandwich ELISA Kit (Cell Signaling Technology No. 7113). Cell extracts were added to microwells that were pre-coated with a mouse anti-phospho-STAT5 antibody and incubated overnight at 4° C. Wells were then washed with PBS and bound phospho-STAT5 (Tyr694) was detected by adding a rabbit anti-STAT5 detection antibody and incubating for 1 h at 37° C. The wells were washed with PBS and an anti-rabbit IgG HRP-linked antibody was added to each well. After a final wash, TMB substrate solution was added to measure the amount of HRP in each well. Absorbance at 450 nm was read in a microplate reader. The signal that was produced is proportional to the quantity of phosphorylated STAT5 in each cell extract.

[1792] A similar method was used to determine agonist activity in freshly isolated and activated PBMCs. Human peripheral blood mononuclear cells (PBMC) were isolated from buffy coats using Lymphoprep® (Stemcell Technologies No. 07811) density gradient centrifugation. The recovered PBMCs were resuspended at 2×10⁶ cells/mL in serum-free I-cell medium (CTS OpTmizer® T cell Expansion SFM, ThermoFisher Scientific No. A1048501)+2 mM L-glutamine+Pen/Strep. Freshly isolated PBMCs were rested overnight in fresh T-cell medium at 2×10⁶ cells/mL with no stimulation. Activated PBMCs were stimulated with 2 μg/mL plate-immobilized anti-CD3 antibody (Purified NA/LE Mouse Anti-Human CD3c, BD Biosciences #557052) and 1 μg/mL anti-CD28 antibody (Purified NA/LE Mouse Anti-Human CD28, BD Biosciences #555725) for 48 hours at 37° C. After incubation, the activated. PBMCs were rested in fresh T-cell medium at 2×10⁶ cells/mL with no stimulation for 72 hours. Rested PBMCs were then plated to a 96-well deep well plate at 10⁶ cells/well. Three-fold serial dilutions of an IL-2Rβγc ligand were added to the cells and incubated for 30 min at 37° C. Detection of pSTAT5 was performed using a PathScan® Phospho-Stat5 (Tyr694) Sandwich ELISA Kit (Cell Signaling Technology No. 7113). Cyno PBMCs pSTAT5 assay protocols are the same as human, except cyno-PBMCs are activated for 72 hours. Cyno-PBMCs were purchased and received overnight on ice.

### Example 41

### Agonist Activity of a Fc-IL-2Rβγc Fusion Protein

[1793] The agonist activity of the Fc-IL-2Rβγc fusion protein having SEQ ID NO: 8135 was evaluated in STAT5 phosphorylation assays in freshly isolated and activated primary human peripheral blood mononuclear cells (PBMCs), and freshly isolated and activated cyno-PBMCs. The fusion protein was incubated with the PBMC cells and STAT5 phosphorylation was measured as a function of concentration using the methods described in Example 40 and are compared with the activity of IL-2.

[1794] Results are presented in FIGS. 34A-34D.

[1795] FIG. 34A shows STAT5 phosphorylation in activated hu-PBMCs.

[1796] FIG. 34B shows STAT5 phosphorylation in TF-1-hu-IL-2Rβ cells.

[1797] FIG. 34C shows STAT5 phosphorylation in activated cyno-PBMCs.

[1798] FIG. 34D shows STAT5 phosphorylation in TF-1-cyno-IL-2Rβ cells.

[1799] The results demonstrate that the IL-2Rβγc ligand having SEQ ID NO: 8135 activates hu-IL-2R but does not activate cyno-IL-2R.

### Example 42

### Competitive Binding of IL-2Rβγc Binding Compounds and Protein Fusions

[1800] The ability of synthetic peptides and Fc-hu-IgG2/IL-2Rβγc fusion proteins to bind to the hu-IL-2Rβ subunit, the cyno-IL-2Rβ subunit, the hu-IL-2Rγc subunit, and to the cyno-IL-2Rγc subunit was determined using the competitive binding assay described in Example 34.

[1801] The IL-2Rβγc ligand had the amino acid sequence of SEQ ID NO: 1263.

[1802] The results are presented in FIGS. 35A-35D.

[1803] FIG. 35A shows competitive binding of the IL-2Rβγc ligand having SEQ ID NO: 1263 to the hu-IL-2Rγc subunit.

[1804] FIG. 35B shows competitive binding of the IL-2Rβγc ligand having SEQ ID NO: 1263 to the hu-IL-2Rβ subunit.

[1805] FIG. 35C shows competitive binding of the IL-2Rβγc ligand having SEQ ID NO: 1263 to the cyno-IL-2Rγc subunit.

[1806] FIG. 35D shows competitive binding of the IL-2Rβγc ligand having SEQ ID NO: 1263 to the cyno-IL-2Rβ subunit.

[1807] The results demonstrate that the IL-2Rβγc ligand having SEQ ID. NO: 1263 binds to both the hu-IL-2Rγc and to the cyno-IL-2Rγc subunit with about the same IC50. However, although the IL-2Rβγc ligand binds to the hu-IL-2Rβ subunit, the IL-2Rβγc ligand only weakly binds to the cyno-IL-2Rβ subunit.

### Example 43

### Binding of an IL-2Rβγc Ligand Having a Rigid Ligand Linker to Hu-IL-2R and Cyno-IL-2R Subunits

[1808] The binding of IL-2Rβγc ligands having the amino acid sequence of SEQ ID NO: 1263 or SEQ ID NO: 4171 to hu-IL-2Rβ, cyno-IL-2Rβ, hu-IL-2Rγc and cyno-IL-2Rγc subunits were determined using the competition binding assay described in Example 39.

[1809] As shown in FIGS. 36A-36B and FIGS. 37A-37B the IL-2Rβγc ligands bound to both the hu-IL-2Rβ, hu-IL-2Rγc, and cyno-IL-2Rγc subunits with a comparable IC50. However only the IL-2Rβγc ligands with an IL-2Rβγc ligand having SEQ ID NO: 4171 bound to the cyno-IL-2Rβ subunit.

[1810] FIG. 36A shows competitive binding of IL-2Rβγc ligands to the cyno-IL-2Rβ subunit, and FIG. 36B shows competitive binding of IL-2Rβγc ligands to the cyno-IL-2Rγc subunit.

[1811] FIG. 37A shows binding of IL-2Rβγc ligands to the hu-IL-2Rβ subunit, and FIG. 37B shows competitive binding of IL-2Rβγc ligands to the hu-IL-2Rγc subunit.

### Example 44

### Activation of IL-2Rβγc in Cyno-PBMCs by an Fc-IL-2Rβγc Fusion Protein

[1812] An Fc-fusion protein (SEQ ID NO: 8127) having an IL-2Rβγc ligand with SEQ ID NO: 4171 on each of the Fc fragments was synthesized was synthesized. A schematic of the Fc-fusion is shown in FIG. 38A.

[1813] The Fc-fusion protein or IL-2 was incubated with either fresh or activated cyno-PBMCs and the STAT5 phosphorylation activity measured as described in Example 40.

[1814] Results presented in FIG. 38B.

[1815] FIG. 38B shows STAT5 phosphorylation activity by the Fc-fusion protein having SEQ ID NO: 8127 in activated cyno-PBMCs.

### Example 45

### Activation of IL-2Rβγc in Human-TF-1β Cells by IL-2Rβγc Ligands and Hu-IgG2/IL-2Rβγc Fc-Fusions

[1816] The ability of IL-2Rβγc ligands having SEQ ID NO: 1263 and SEQ ID NO: 4171 to activate TF-1β cells was determined using the STAT5 phosphorylation assay described in Example 40. The results are presented in FIG. 39A and compared with the activation of TF-1β cells by IL-2.

[1817] The ability of hu-IgG2/IL-2Rβγc Fc-fusion proteins having SEQ ID NO: 8135 and SEQ ID NO: 8127 to activate hu-TF-1β cells was determined using the STAT5 phosphorylation assay described in Example 40. The results are presented in FIGS. 39A-39B and compared with the activation of the TF-1β cells by IL-2.

[1818] The results demonstrate that the IL-2Rβγc ligands having SEQ ID NO: 1263 and SEQ ID NO: 4171 and the corresponding hu-IgG2/IL-2Rβγc Fc-fusion proteins activated IL-2Rβγc in hu-TF-1β cells.

### Example 46

### Activation of IL-2Rβγc in Human-PBMC by IL-2Rβγc Ligands and Hu-IgG2/IL-2Rβγc Fc-Fusions

[1819] The ability of IL-2Rβγc ligands having SEQ ID NOS: 1263 and 4171 and the corresponding hu-IgG2/IL-2Rβγc Fc-fusion proteins having SEQ ID NO: 8135 and SEQ ID NO: 8127 to activate STAT5 phosphorylation in activated hu-PBMCs was determined using the STAT5 phosphorylation assay described in Example 40. The results are presented in FIGS. 40A-40B and compared with the STAT5 phosphorylation in activated hu-PBMCs induced by IL-2.

[1820] The results demonstrate that the IL-2Rβγc ligands having SEQ ID NO: 4160 and SEQ ID NO: 4171 and the corresponding hu-IgG2/IL-2Rβγc Fc-fusion proteins activated IL-2Rβγc in activated hu-PBMCs.

### Example 47

### Activity of Alanine Scan Peptides

[1821] A series of peptides were synthesized in which either one or two amino acid residues of the IL-2Rβ ligand having SEQ ID NO: 1442 was replaced by an alanine residue (Alanine-scan). When the parent reside is an alanine, then this was substituted with a glycine. The peptide sequences were synthesized using standard solid phase synthesis conditions and Fmoc-protected amino acids as described in Example 1. The binding of the Ala-scan peptides with hu-IL-2Rβ and cyno-IL-2Rβ were evaluated using a competition binding assay as described in Example 34.

[1822] The peptide sequences having a single alanine substitution are provided in Table 23 and the peptide sequences having two alanine substitutions are provided in Table 24.

TABLE 23
Single alanine scan peptide based on peptide having
SEQ ID NO: 1442.

| | |
|---|---|
| SEQ ID NO: 3169 | G G R Y V H D C A I A Q V G D L C D L F L H G G |
| SEQ ID NO: 3170 | G G R Y V H D C F A A Q V G D L C D L F L H G G |
| SEQ ID NO: 3171 | G G R Y V H D C F I G Q V G D L C D L F L H G G |
| SEQ ID NO: 3172 | G G R Y V H D C F I A A V G D L C D L F L H G G |
| SEQ ID NO: 3173 | G G R Y V H D C F I A Q A G D L C D L F L H G G |
| SEQ ID NO: 3174 | G G R Y V H D C F I A Q V A D L C D L F L H G G |
| SEQ ID NO: 3175 | G G R Y V H D C F I A Q V G A L C D L F L H G G |
| SEQ ID NO: 3176 | G G R Y V H D C F I A Q V G D A C D L F L H G G |
| SEQ ID NO: 3177 | G G A Y V H D C F I A Q V G D L C D L F L H G G |
| SEQ ID NO: 3178 | G G R A V H D C F I A Q V G D L C D L F L H G G |
| SEQ ID NO: 3179 | G G R Y A H D C F I A Q V G D L C D L F L H G G |
| SEQ ID NO: 3180 | G G R Y V A D C F I A Q V G D L C D L F L H G G |
| SEQ ID NO: 3181 | G G R Y V H A C F I A Q V G D L C D L F L H G G |
| SEQ ID NO: 3182 | G G R Y V H D C F I A Q V G D L C D L F L A G G |
| SEQ ID NO: 3183 | G G R Y V H D C F I A Q V G D L C D L F A H G G |
| SEQ ID NO: 3184 | G G R Y V H D C F I A Q V G D L C D L A L H G G |
| SEQ ID NO: 3185 | G G R Y V H D C F I A Q V G D L C D A F L H G G |
| SEQ ID NO: 3186 | G G R Y V H D C F I A Q V G D L C A L F L H G G |

TABLE 24
Double alanine scan peptides based on peptide having
SEQ ID NO: 1442.

| | |
|---|---|
| SEQ ID NO: 3200 | G G R Y V H D C F I G A V G D L C D L F L H G G |
| SEQ ID NO: 3201 | G G R Y V H D C F I G Q V G D L C D L F A H G G |
| SEQ ID NO: 3202 | G G A Y V H D C F I G Q V G D L C D L F L H G G |
| SEQ ID NO: 3203 | G G R Y V A D C F I G Q V G D L C D L F L H G G |
| SEQ ID NO: 3204 | G G R Y V H D C F I G Q V G D L C A L F L H G G |
| SEQ ID NO: 3205 | G G R Y V H D C F I G Q V A D L C D L F L H G G |
| SEQ ID NO: 3206 | G G R Y V H D C F I G Q A G D L C D L F L H G G |
| SEQ ID NO: 3207 | G G R Y V H D C F I G Q V G D A C D L F L H G G |

[1823] Peptides having SEQ ID NOS: 3137, 3114, 3107, 3122, 3124-3128, 3147, 3170-3174, 3176-3180, 3182, 3183, 3185, 3186, 3200, 3202, and 3204 bind to both the hu-IL-2Rβ subunit and to the cyno-IL-2Rβ subunit with an IC50 less than 100 μM as determined using the competition ELISA assay described in Example 39.

[1824] Fc-fusion proteins with IL-2Rβγc ligands from the alanine peptide scan were evaluated for their ability to activate hu-TF-1β cells. The amino acid sequences of the IL-2Rβγc ligands is presented in Table 25. IgG2 Fc-fusion proteins were prepared as described in Example 14.

[1825] The ability of the Fc-fusion proteins to activate STAT5 phosphorylation in hu-TF-143 cells was determined as described in Example 28 and the results are presented in FIG. 41.

TABLE 25
Amino acid sequences of hIgG2-Fc-IL-2Rβγc fusion proteins.

| | |
|---|---|
| SEQ ID NO: 8127 | hIgG2-Fc-(PA)10-3115/9342 (PA)8G linker |
| | ERKSSVECPPCPAPPVAGPSVFLFPPKPKDTLMISRTPEVTCVVVDVSHEDP |
| | EVQFNWYVDGVEVHNAKTKPREEQFNSTFRVVSVLTVVHQDWLNGKEY |
| | KCKVSNKGLPAPIEKTISKTKGQPREPQVYTLPPSREEMTKNQVSLTCLVK |
| | GFYPSDIAVEWESNGQPENNYKTTPPMLDSDGSFFLYSKLTVDKSRWQQG |
| | NVFSCSVMHEALHNHYTQKSLSLSPGA-(GS)10- |
| | GGGELLVDCFKVKVGELCDLFFG-(PA)8G-VVCQDWEGVELCWQGG |
| SEQ ID NO: 8128 | hIgG2-Fc-(GS)10-3137/9342 (PA)8G linker |
| | ERKSSVECPPCPAPPVAGPSVFLFPPKPKDTLMISRTPEVTCVVVDVSHEDP |
| | EVQFNWYVDGVEVHNAKTKPREEQFNSTFRVVSVLTVVHQDWLNGKEY |
| | KCKVSNKGLPAPIEKTISKTKGQPREPQVYTLPPSREEMTKNQVSLTCLVK |
| | GFYPSDIAVEWESNGQPENNYKTTPPMLDSDGSFFLYSKLTVDKSRWQQG |
| | NVFSCSVMHEALHNHYTQKSLSLSPGA-(GS)10- |
| | GGRYVHDCFIAQVGDLCDLFLH-(PA)8G-VVCQDWEGVELCWQGG |
| SEQ ID NO: 8129 | hIgG2-Fc-(GS)10-3170/9342 (PA)8G linker |
| | ERKSSVECPPCPAPPVAGPSVFLFPPKPKDTLMISRTPEVTCVVVDVSHEDP |
| | EVQFNWYVDGVEVHNAKTKPREEQFNSTFRVVSVLTVVHQDWLNGKEY |
| | KCKVSNKGLPAPIEKTISKTKGQPREPQVYTLPPSREEMTKNQVSLTCLVK |
| | GFYPSDIAVEWESNGQPENNYKTTPPMLDSDGSFFLYSKLTVDKSRWQQG |
| | NVFSCSVMHEALHNHYTQKSLSLSPGA-(GS)10- |
| | GGRYVHDCFAAQVGDLCDLFLHGG-(PA)8G-VVCQDWEGVELCWQGG |
| SEQ ID NO: 8130 | hIgG2-Fc-(GS)10-3182/9342 (PA)8G linker |
| | ERKSSVECPPCPAPPVAGPSVFLFPPKPKDTLMISRTPEVTCVVVDVSHEDP |
| | EVQFNWYVDGVEVHNAKTKPREEQFNSTFRVVSVLTVVHQDWLNGKEY |
| | KCKVSNKGLPAPIEKTISKTKGQPREPQVYTLPPSREEMTKNQVSLTCLVK |
| | GFYPSDIAVEWESNGQPENNYKTTPPMLDSDGSFFLYSKLTVDKSRWQQG |
| | NVFSCSVMHEALHNHYTQKSLSLSPGA-(GS)10- |
| | GGRYVHDCFIAQVGDLCDLFLAGG-(PA)8G-VVCQDWEGVELCWQGG |
| SEQ ID NO: 8131 | hIgG2-Fc-(GS)10-3185/9342 (PA)8G linker |
| | ERKSSVECPPCPAPPVAGPSVFLFPPKPKDTLMISRTPEVTCVVVDVSHEDP |
| | EVQFNWYVDGVEVHNAKTKPREEQFNSTFRVVSVLTVVHQDWLNGKEY |
| | KCKVSNKGLPAPIEKTISKTKGQPREPQVYTLPPSREEMTKNQVSLTCLVK |
| | GFYPSDIAVEWESNGQPENNYKTTPPMLDSDGSFFLYSKLTVDKSRWQQG |
| | NVFSCSVMHEALHNHYTQKSLSLSPGA-(GS)10- |
| | GGRYVHDCFIAQVGDLCDAFLHGG-(PA)8G-VVCQDWEGVELCWQGG |
| SEQ ID NO: 8132 | hIgG2-Fc-(GS)10-3172/9342 (PA)8G linker |
| | ERKSSVECPPCPAPPVAGPSVFLFPPKPKDTLMISRTPEVTCVVVDVSHEDP |
| | EVQFNWYVDGVEVHNAKTKPREEQFNSTFRVVSVLTVVHQDWLNGKEY |
| | KCKVSNKGLPAPIEKTISKTKGQPREPQVYTLPPSREEMTKNQVSLTCLVK |
| | GFYPSDIAVEWESNGQPENNYKTTPPMLDSDGSFFLYSKLTVDKSRWQQG |
| | NVFSCSVMHEALHNHYTQKSLSLSPGA-(GS)10- |
| | GGRYVHDCFIAAVGDLCDLFLHGG-(PA)8G-VVCQDWEGVELCWQGG |
| SEQ ID NO: 8133 | hIgG2-Fc-(GS)10-3184/9342 (PA)8G linker |
| | ERKSSVECPPCPAPPVAGPSVFLFPPKPKDTLMISRTPEVTCVVVDVSHEDP |
| | EVQFNWYVDGVEVHNAKTKPREEQFNSTFRVVSVLTVVHQDWLNGKEY |
| | KCKVSNKGLPAPIEKTISKTKGQPREPQVYTLPPSREEMTKNQVSLTCLVK |
| | GFYPSDIAVEWESNGQPENNYKTTPPMLDSDGSFFLYSKLTVDKSRWQQG |
| | NVFSCSVMHEALHNHYTQKSLSLSPGA-(GS)10- |
| | GGRYVHDCFIAQVGDLCDLFAHGG-(PA)8G-VVCQDWEGVELCWQGG |
| SEQ ID NO: 8134 | hIgG2-Fc-(GS)10-3178/9342 (PA)8G linker |
| | ERKSSVECPPCPAPPVAGPSVFLFPPKPKDTLMISRTPEVTCVVVDVSHEDP |
| | EVQFNWYVDGVEVHNAKTKPREEQFNSTFRVVSVLTVVHQDWLNGKEY |
| | KCKVSNKGLPAPIEKTISKTKGQPREPQVYTLPPSREEMTKNQVSLTCLVK |
| | GFYPSDIAVEWESNGQPENNYKTTPPMLDSDGSFFLYSKLTVDKSRWQQG |
| | NVFSCSVMHEALHNHYTQKSLSLSPGA-(GS)10- |
| | GGAYVHDCFIAQVGDLCDLFLHGG-(PA)8G-VVCQDWEGVELCWQGG |

[1826] Finally, it should be noted that there are alternative ways of implementing the embodiments disclosed herein. Accordingly, the present embodiments are to be considered as illustrative and not restrictive, and the claims are not to be limited to the details given herein but may be modified within the scope and equivalents thereof.

The application's sequence listing, which the Patent Office published only in electronic form, follows.

SEQUENCE LISTING (9453 sequences)

SEQ ID NO: 1-57 - skipped (57 entries)

SEQ ID NO: 58 - protein, 14 aa, Artificial Sequence
  Description of Artificial Sequence: Synthetic peptide
YDCRIAQVGELCDL

SEQ ID NO: 59-82 - skipped (24 entries)

SEQ ID NO: 83 - protein, 14 aa, Artificial Sequence
  Description of Artificial Sequence: Synthetic peptide
CCYQAMVGDLCDFC

SEQ ID NO: 84-141 - skipped (58 entries)

SEQ ID NO: 142 - protein, 8 aa, Artificial Sequence
  Description of Artificial Sequence: Synthetic peptide
EDALLGDF

SEQ ID NO: 143-168 - skipped (26 entries)

SEQ ID NO: 169 - protein, 14 aa, Artificial Sequence
  Description of Artificial Sequence: Synthetic peptide
NMCLVGDYWPSCQI

SEQ ID NO: 170 - protein, 14 aa, Artificial Sequence
  Description of Artificial Sequence: Synthetic peptide
QICDVGQWWPDCQV

SEQ ID NO: 171-197 - skipped (27 entries)

SEQ ID NO: 198 - protein, 14 aa, Artificial Sequence
  Description of Artificial Sequence: Synthetic peptide
KVCEMWGGVLLCWN

SEQ ID NO: 199-201 - skipped (3 entries)

SEQ ID NO: 202 - protein, 14 aa, Artificial Sequence
  Description of Artificial Sequence: Synthetic peptide
RTCTEWENVVLCWV

SEQ ID NO: 203-221 - skipped (19 entries)

SEQ ID NO: 222 - protein, 14 aa, Artificial Sequence
  Description of Artificial Sequence: Synthetic peptide
VMCERWQGVELCWL

SEQ ID NO: 223 - skipped

SEQ ID NO: 224 - protein, 12 aa, Artificial Sequence
  Description of Artificial Sequence: Synthetic peptide
DCSMWEGVELCW

SEQ ID NO: 225-235 - skipped (11 entries)

SEQ ID NO: 236 - protein, 14 aa, Artificial Sequence
  Description of Artificial Sequence: Synthetic peptide
MCWLEWGEWVGSCL

SEQ ID NO: 237-247 - skipped (11 entries)

SEQ ID NO: 248 - protein, 12 aa, Artificial Sequence
  Description of Artificial Sequence: Synthetic peptide
DLSDLSTFWLSQ

SEQ ID NO: 249-265 - skipped (17 entries)

SEQ ID NO: 266 - protein, 14 aa, Artificial Sequence
  Description of Artificial Sequence: Synthetic peptide
CPSMLQGPERTWVC

SEQ ID NO: 267-611 - skipped (345 entries)

SEQ ID NO: 612 - protein, 14 aa, Artificial Sequence
  Description of Artificial Sequence: Synthetic peptide
YPCWMAQLGELCDL

SEQ ID NO: 613-662 - skipped (50 entries)

SEQ ID NO: 663 - protein, 14 aa, Artificial Sequence
  Description of Artificial Sequence: Synthetic peptide
YDCRIAQVGELCDL

SEQ ID NO: 664 - protein, 20 aa, Artificial Sequence
  Description of Artificial Sequence: Synthetic peptide
YPCHMAQLGELCDLWSWGDI

SEQ ID NO: 665-670 - skipped (6 entries)

SEQ ID NO: 671 - protein, 20 aa, Artificial Sequence
  Description of Artificial Sequence: Synthetic peptide
VQYKKCWMAQLGDLCELDPS

SEQ ID NO: 672-804 - skipped (133 entries)

SEQ ID NO: 805 - protein, 17 aa, Artificial Sequence
  Description of Artificial Sequence: Synthetic peptide
  MOD_RES (1)..(1): Any amino acid
  MOD_RES (2)..(2): Any amino acid comprising an aromatic side chain
  MOD_RES (3)..(3): Any amino acid comprising a large hydrophobic side chain or an aromatic side chain
  MOD_RES (6)..(6): Any amino acid comprising an aromatic side chain
  MOD_RES (7)..(7): Any amino acid comprising a large hydrophobic side chain
  MOD_RES (9)..(9): Any amino acid comprising a basic side chain or a polar/neutral side chain
  MOD_RES (10)..(10): Any amino acid comprising a large hydrophobic side chain
  MOD_RES (12)..(12): Any amino acid comprising an acidic side chain or a polar/neutral side chain
  MOD_RES (16)..(16): Any amino acid comprising a large hydrophobic side chain
  MOD_RES (17)..(17): Any amino acid comprising an acidic side chain
XXXPCXXAXXGXLCDXX

SEQ ID NO: 806 - protein, 15 aa, Artificial Sequence
  Description of Artificial Sequence: Synthetic peptide
  MOD_RES (1)..(1): Any amino acid comprising an aromatic side chain
  MOD_RES (2)..(2): Any amino acid comprising a large hydrophobic side chain or an aromatic side chain
  MOD_RES (5)..(5): Any amino acid comprising an aromatic side chain
  MOD_RES (6)..(6): Any amino acid comprising a large hydrophobic side chain
  MOD_RES (8)..(8): Any amino acid comprising a basic side chain or a polar/neutral side chain
  MOD_RES (9)..(9): Any amino acid comprising a large hydrophobic side chain
  MOD_RES (11)..(11): Any amino acid comprising an acidic side chain or a polar/neutral side chain
  MOD_RES (15)..(15): Any amino acid comprising a large hydrophobic side chain
XXPCXXAXXGXLCDX

SEQ ID NO: 807 - protein, 14 aa, Artificial Sequence
  Description of Artificial Sequence: Synthetic peptide
  MOD_RES (1)..(1): Any amino acid comprising a large hydrophobic side chain or an aromatic side chain
  MOD_RES (4)..(4): Any amino acid comprising an aromatic side chain
  MOD_RES (5)..(5): Any amino acid comprising a large hydrophobic side chain
  MOD_RES (7)..(7): Any amino acid comprising a basic side chain or a polar/neutral side chain
  MOD_RES (8)..(8): Any amino acid comprising a large hydrophobic side chain
  MOD_RES (10)..(10): Any amino acid comprising an acidic side chain or a polar/neutral side chain
  MOD_RES (14)..(14): Any amino acid comprising a large hydrophobic side chain
XPCXXAXXGXLCDX

SEQ ID NO: 808 - protein, 12 aa, Artificial Sequence
  Description of Artificial Sequence: Synthetic peptide
  MOD_RES (3)..(3): Any amino acid comprising an aromatic side chain
  MOD_RES (4)..(4): Any amino acid comprising a large hydrophobic side chain
  MOD_RES (6)..(6): Any amino acid comprising a basic side chain or a polar/neutral side chain
  MOD_RES (7)..(7): Any amino acid comprising a large hydrophobic side chain
  MOD_RES (9)..(9): Any amino acid comprising an acidic side chain or a polar/neutral side chain
PCXXAXXGXLCD

SEQ ID NO: 809 - protein, 10 aa, Artificial Sequence
  Description of Artificial Sequence: Synthetic peptide
  MOD_RES (2)..(2): Any amino acid comprising an aromatic side chain
  MOD_RES (3)..(3): Any amino acid comprising a large hydrophobic side chain
  MOD_RES (5)..(5): Any amino acid comprising a basic side chain or a polar/neutral side chain
  MOD_RES (6)..(6): Any amino acid comprising a large hydrophobic side chain
  MOD_RES (8)..(8): Any amino acid comprising an acidic side chain or a polar/neutral side chain
CXXAXXGXLC

SEQ ID NO: 810 - protein, 20 aa, Artificial Sequence
  Description of Artificial Sequence: Synthetic peptide
QPCWLAQVGDLCDLLWPGPL

SEQ ID NO: 811 - protein, 16 aa, Artificial Sequence
  Description of Artificial Sequence: Synthetic peptide
WLPCWIARLGDLCDLE

SEQ ID NO: 812 - protein, 16 aa, Artificial Sequence
  Description of Artificial Sequence: Synthetic peptide
WYPCWMALLGELCDQE

SEQ ID NO: 813 - protein, 16 aa, Artificial Sequence
  Description of Artificial Sequence: Synthetic peptide
WYPCYRARLGELCDLD

SEQ ID NO: 814 - protein, 22 aa, Artificial Sequence
  Description of Artificial Sequence: Synthetic peptide
WQREWRWFPCWMAKLGDMCDLD

SEQ ID NO: 815 - protein, 22 aa, Artificial Sequence
  Description of Artificial Sequence: Synthetic peptide
QDEAVEWFPCWMARLGELCDLE

SEQ ID NO: 816 - protein, 16 aa, Artificial Sequence
  Description of Artificial Sequence: Synthetic peptide
YYPCWMARLGELCDLD

SEQ ID NO: 817 - protein, 22 aa, Artificial Sequence
  Description of Artificial Sequence: Synthetic peptide
SVVVNNWLPCWMAQLGELCDLD

SEQ ID NO: 818 - protein, 16 aa, Artificial Sequence
  Description of Artificial Sequence: Synthetic peptide
WYPCWLAQLGDLCDLD

SEQ ID NO: 819 - protein, 22 aa, Artificial Sequence
  Description of Artificial Sequence: Synthetic peptide
VMSPTRWLPCWIAKLGELCDLE

SEQ ID NO: 820 - protein, 16 aa, Artificial Sequence
  Description of Artificial Sequence: Synthetic peptide
WFPCWMAQLGQLCDLE

SEQ ID NO: 821 - protein, 22 aa, Artificial Sequence
  Description of Artificial Sequence: Synthetic peptide
WRPCWRAYLGELCDLEAMPRAT

SEQ ID NO: 822 - protein, 22 aa, Artificial Sequence
  Description of Artificial Sequence: Synthetic peptide
IRSCSPCWSADVGELCDLECEW

SEQ ID NO: 823 - protein, 22 aa, Artificial Sequence
  Description of Artificial Sequence: Synthetic peptide
SGHWYPCWMARLGELCDMEERA

SEQ ID NO: 824 - protein, 22 aa, Artificial Sequence
  Description of Artificial Sequence: Synthetic peptide
WYPCWMAQLGELCDLQTMGYSH

SEQ ID NO: 825 - protein, 22 aa, Artificial Sequence
  Description of Artificial Sequence: Synthetic peptide
AGDWLPCWMAELGELCDLEGPT

SEQ ID NO: 826 - protein, 22 aa, Artificial Sequence
  Description of Artificial Sequence: Synthetic peptide
WLPCWIASLGELCDLDTGKRQG

SEQ ID NO: 827 - protein, 22 aa, Artificial Sequence
  Description of Artificial Sequence: Synthetic peptide
WLPCWMAHLGQLCDLDLPGKSM

SEQ ID NO: 828 - protein, 22 aa, Artificial Sequence
  Description of Artificial Sequence: Synthetic peptide
EGVFFPCWIARLGELCDLDHGL

SEQ ID NO: 829 - protein, 22 aa, Artificial Sequence
  Description of Artificial Sequence: Synthetic peptide
TGRWKPCWMAGLHELCDLEGFR

SEQ ID NO: 830 - protein, 22 aa, Artificial Sequence
  Description of Artificial Sequence: Synthetic peptide
RKHFYPCWMAQLGELCDLEGMP

SEQ ID NO: 831 - protein, 22 aa, Artificial Sequence
  Description of Artificial Sequence: Synthetic peptide
DIGYYPCWMAQVGDLCDLDDEK

SEQ ID NO: 832 - protein, 22 aa, Artificial Sequence
  Description of Artificial Sequence: Synthetic peptide
DSDWWPCWMAQLGELCDLEDAR

SEQ ID NO: 833 - protein, 22 aa, Artificial Sequence
  Description of Artificial Sequence: Synthetic peptide
GERWKPCWIAQLGELCDLDFNW

SEQ ID NO: 834 - protein, 22 aa, Artificial Sequence
  Description of Artificial Sequence: Synthetic peptide
WWPCWMAQLGEMCDLEYPYVPG

SEQ ID NO: 835 - protein, 22 aa, Artificial Sequence
  Description of Artificial Sequence: Synthetic peptide
QTKLEGWYPCWMAQLGELCDLD

SEQ ID NO: 836 - protein, 22 aa, Artificial Sequence
  Description of Artificial Sequence: Synthetic peptide
WGRKEQWLPCWKAQLGELCDLE

SEQ ID NO: 837 - protein, 22 aa, Artificial Sequence
  Description of Artificial Sequence: Synthetic peptide
VPRANAWHPCWMAQLGELCDLE

SEQ ID NO: 838 - protein, 22 aa, Artificial Sequence
  Description of Artificial Sequence: Synthetic peptide
GRQQKGWYPCWLAQLGELCDME

SEQ ID NO: 839 - protein, 22 aa, Artificial Sequence
  Description of Artificial Sequence: Synthetic peptide
WLNRHLFNPCWMARLGELCDLE

SEQ ID NO: 840 - protein, 22 aa, Artificial Sequence
  Description of Artificial Sequence: Synthetic peptide
AQVRREWYPCWMAQLGELCDLT

SEQ ID NO: 841 - protein, 22 aa, Artificial Sequence
  Description of Artificial Sequence: Synthetic peptide
ETEQMSWYPCWVAQLWELCDLD

SEQ ID NO: 842 - protein, 21 aa, Artificial Sequence
  Description of Artificial Sequence: Synthetic peptide
WLPCWLAKLGELCDLEWLPCW

SEQ ID NO: 843 - protein, 22 aa, Artificial Sequence
  Description of Artificial Sequence: Synthetic peptide
ERRPDTWFPCWRALVGELCDLE

SEQ ID NO: 844 - protein, 22 aa, Artificial Sequence
  Description of Artificial Sequence: Synthetic peptide
WGRNRSWYPCWMAQLGELCDLE

SEQ ID NO: 845 - protein, 22 aa, Artificial Sequence
  Description of Artificial Sequence: Synthetic peptide
QDRRSPWYPCWMAKLGELCDLA

SEQ ID NO: 846 - protein, 24 aa, Artificial Sequence
  Description of Artificial Sequence: Synthetic peptide
TRRWYPCYLAKLGELCDLFEGGTR

SEQ ID NO: 847 - protein, 24 aa, Artificial Sequence
  Description of Artificial Sequence: Synthetic peptide
SEQWWPCWIARLGELCDLDRELSE

SEQ ID NO: 848 - protein, 25 aa, Artificial Sequence
  Description of Artificial Sequence: Synthetic peptide
WYPCWVAQLGEICDLEMTGPDSWYP

SEQ ID NO: 849 - protein, 22 aa, Artificial Sequence
  Description of Artificial Sequence: Synthetic peptide
QDGWLPCWMAQLGELCDLEYKR

SEQ ID NO: 850 - protein, 22 aa, Artificial Sequence
  Description of Artificial Sequence: Synthetic peptide
NRRWYPCWMAQLGELCDLDSRP

SEQ ID NO: 851 - protein, 22 aa, Artificial Sequence
  Description of Artificial Sequence: Synthetic peptide
FYPCWMAHLGELCDLDGDTDSM

SEQ ID NO: 852 - protein, 22 aa, Artificial Sequence
  Description of Artificial Sequence: Synthetic peptide
KSNFFPCWIAQLGQLCDLEPET

SEQ ID NO: 853 - protein, 22 aa, Artificial Sequence
  Description of Artificial Sequence: Synthetic peptide
FYPCWMANLGELCDLDFLRELN

SEQ ID NO: 854 - protein, 22 aa, Artificial Sequence
  Description of Artificial Sequence: Synthetic peptide
HASWLPCWLAQLGELCDLEPNP

SEQ ID NO: 855 - protein, 22 aa, Artificial Sequence
  Description of Artificial Sequence: Synthetic peptide
NGAWYPCWMAQVGELCDLEERW

SEQ ID NO: 856 - protein, 22 aa, Artificial Sequence
  Description of Artificial Sequence: Synthetic peptide
WRRWYPCWVAQVGELCDLEIEA

SEQ ID NO: 857 - protein, 22 aa, Artificial Sequence
  Description of Artificial Sequence: Synthetic peptide
RQAWYPCWMAQLGELCDLEAEL

SEQ ID NO: 858 - protein, 22 aa, Artificial Sequence
  Description of Artificial Sequence: Synthetic peptide
RQRWYPCWMARLGELCDLDEPT

SEQ ID NO: 859 - protein, 22 aa, Artificial Sequence
  Description of Artificial Sequence: Synthetic peptide
NNSREGWFPCWLAKLGDLCDLD

SEQ ID NO: 860 - protein, 16 aa, Artificial Sequence
  Description of Artificial Sequence: Synthetic peptide
YYPCWMAQLGELCDLE

SEQ ID NO: 861 - protein, 16 aa, Artificial Sequence
  Description of Artificial Sequence: Synthetic peptide
WYPCWLAQLGELCDLD

SEQ ID NO: 862 - protein, 22 aa, Artificial Sequence
  Description of Artificial Sequence: Synthetic peptide
SWHAETWYPCWLAQVGELCDLD

SEQ ID NO: 863 - protein, 22 aa, Artificial Sequence
  Description of Artificial Sequence: Synthetic peptide
KMHKAVWLPCWMAQVGELCDLE

SEQ ID NO: 864 - protein, 22 aa, Artificial Sequence
  Description of Artificial Sequence: Synthetic peptide
DVLGDRWYPCWIAKLGELCDLD

SEQ ID NO: 865 - protein, 16 aa, Artificial Sequence
  Description of Artificial Sequence: Synthetic peptide
WYPCWMAQLGELCDLD

SEQ ID NO: 866 - protein, 22 aa, Artificial Sequence
  Description of Artificial Sequence: Synthetic peptide
KLQSWRWYPCWMAQLGELCDLD

SEQ ID NO: 867 - protein, 22 aa, Artificial Sequence
  Description of Artificial Sequence: Synthetic peptide
NEPEGGFYPCWLAQLGELCDLH

SEQ ID NO: 868 - protein, 16 aa, Artificial Sequence
  Description of Artificial Sequence: Synthetic peptide
WYPCWMARLGELCDLE

SEQ ID NO: 869 - protein, 22 aa, Artificial Sequence
  Description of Artificial Sequence: Synthetic peptide
FYPCWTALLGELCDLEPGPPAM

SEQ ID NO: 870 - protein, 22 aa, Artificial Sequence
  Description of Artificial Sequence: Synthetic peptide
WGTTWRWYPCWMAQLGELCDLE

SEQ ID NO: 871 - protein, 22 aa, Artificial Sequence
  Description of Artificial Sequence: Synthetic peptide
AKGWDTWKPCWLANLGELCDLE

SEQ ID NO: 872 - protein, 22 aa, Artificial Sequence
  Description of Artificial Sequence: Synthetic peptide
RDESAGYYPCWIAQLGELCDLE

SEQ ID NO: 873 - protein, 16 aa, Artificial Sequence
  Description of Artificial Sequence: Synthetic peptide
WYPCWIAKLGELCDLE

SEQ ID NO: 874 - protein, 16 aa, Artificial Sequence
  Description of Artificial Sequence: Synthetic peptide
WYPCWIAQLGELCDLD

SEQ ID NO: 875 - protein, 16 aa, Artificial Sequence
  Description of Artificial Sequence: Synthetic peptide
WYPCWLAKLGELCDLD

SEQ ID NO: 876 - protein, 22 aa, Artificial Sequence
  Description of Artificial Sequence: Synthetic peptide
QGPVRLWYPCWMAQLGELCDLD

SEQ ID NO: 877 - protein, 16 aa, Artificial Sequence
  Description of Artificial Sequence: Synthetic peptide
WYPCWMAQPGELCDVD

SEQ ID NO: 878 - protein, 16 aa, Artificial Sequence
  Description of Artificial Sequence: Synthetic peptide
WHPCWIAQLGELCDLE

SEQ ID NO: 879 - protein, 16 aa, Artificial Sequence
  Description of Artificial Sequence: Synthetic peptide
WYPCWIAQLGELCDLE

SEQ ID NO: 880 - protein, 22 aa, Artificial Sequence
  Description of Artificial Sequence: Synthetic peptide
VRPMGVWYPCWIAQLGELCDLV

SEQ ID NO: 881 - protein, 22 aa, Artificial Sequence
  Description of Artificial Sequence: Synthetic peptide
VPRWYPCWIAQLGELCDLDSDD

SEQ ID NO: 882 - protein, 22 aa, Artificial Sequence
  Description of Artificial Sequence: Synthetic peptide
YRGWLPCWRAKLGDLCDLGQPM

SEQ ID NO: 883 - protein, 22 aa, Artificial Sequence
  Description of Artificial Sequence: Synthetic peptide
GEAWYPCWLARLGELCDMDPRV

SEQ ID NO: 884 - protein, 22 aa, Artificial Sequence
  Description of Artificial Sequence: Synthetic peptide
WYPCWMAQLGELCDLDESTRLT

SEQ ID NO: 885 - protein, 22 aa, Artificial Sequence
  Description of Artificial Sequence: Synthetic peptide
IGSWWPCWMAQLGELCDLEPEL

SEQ ID NO: 886 - protein, 22 aa, Artificial Sequence
  Description of Artificial Sequence: Synthetic peptide
GTTWYPCWLAQLGELCDLDVLE

SEQ ID NO: 887 - protein, 22 aa, Artificial Sequence
  Description of Artificial Sequence: Synthetic peptide
WWPCWMAQLGDLCDLEETSGGT

SEQ ID NO: 888 - protein, 22 aa, Artificial Sequence
  Description of Artificial Sequence: Synthetic peptide
WYPCWMAQLGELCDLGPTESNL

SEQ ID NO: 889 - protein, 22 aa, Artificial Sequence
  Description of Artificial Sequence: Synthetic peptide
WYPCWMANLGELCDLEYPSWAQ

SEQ ID NO: 890 - protein, 22 aa, Artificial Sequence
  Description of Artificial Sequence: Synthetic peptide
RGMCYPCWFARLGELCDLECDQ

SEQ ID NO: 891 - protein, 22 aa, Artificial Sequence
  Description of Artificial Sequence: Synthetic peptide
WYPCWMAQLGELCDLDAGARHL

SEQ ID NO: 892 - protein, 22 aa, Artificial Sequence
  Description of Artificial Sequence: Synthetic peptide
KSGWYPCWMAKLGELCDLEAQP

SEQ ID NO: 893 - protein, 22 aa, Artificial Sequence
  Description of Artificial Sequence: Synthetic peptide
GPRFYPCWIAQLGELCDLEDMG

SEQ ID NO: 894 - protein, 22 aa, Artificial Sequence
  Description of Artificial Sequence: Synthetic peptide
RVTWYPCWMAQLGELCDLEESV

SEQ ID NO: 895 - protein, 22 aa, Artificial Sequence
  Description of Artificial Sequence: Synthetic peptide
WLPCWMAQLGDLCDLEQYVPLP

SEQ ID NO: 896 - protein, 22 aa, Artificial Sequence
  Description of Artificial Sequence: Synthetic peptide
YLPCWMAHLGELCDLDSPLKAR

SEQ ID NO: 897 - protein, 22 aa, Artificial Sequence
  Description of Artificial Sequence: Synthetic peptide
WYPCWMAQLGELCDLDDHWPAM

SEQ ID NO: 898 - protein, 22 aa, Artificial Sequence
  Description of Artificial Sequence: Synthetic peptide
WYPCWRAQLGELCDLDPPIAVE

SEQ ID NO: 899 - protein, 22 aa, Artificial Sequence
  Description of Artificial Sequence: Synthetic peptide
WYPCWMANLGELCDLEAERSPV

SEQ ID NO: 900 - protein, 22 aa, Artificial Sequence
  Description of Artificial Sequence: Synthetic peptide
RDQYYPCWMAQLGELCDLDEVF

SEQ ID NO: 901 - protein, 22 aa, Artificial Sequence
  Description of Artificial Sequence: Synthetic peptide
WYPCWMAQLGDLCDLEKPVTER

SEQ ID NO: 902 - protein, 22 aa, Artificial Sequence
  Description of Artificial Sequence: Synthetic peptide
WYPCWIARLGELCDLETSGGFP

SEQ ID NO: 903 - protein, 21 aa, Artificial Sequence
  Description of Artificial Sequence: Synthetic peptide
SGHCYPCWLAGLGELCDLNCG

SEQ ID NO: 904-910 - skipped (7 entries)

SEQ ID NO: 911 - protein, 18 aa, Artificial Sequence
  Description of Artificial Sequence: Synthetic peptide
GGYDCRIAQVGELCDLGG

SEQ ID NO: 912 - protein, 23 aa, Artificial Sequence
  Description of Artificial Sequence: Synthetic peptide
GVQYKKCWMAQLGDLCELDPSGG

SEQ ID NO: 913 - protein, 20 aa, Artificial Sequence
  Description of Artificial Sequence: Synthetic peptide
GGYPCWMAQLGELCDLGGRR

SEQ ID NO: 914 - skipped

SEQ ID NO: 915 - protein, 22 aa, Artificial Sequence
  Description of Artificial Sequence: Synthetic peptide
GGWYPCWMAQLGELCDLDGGRR

SEQ ID NO: 916 - protein, 26 aa, Artificial Sequence
  Description of Artificial Sequence: Synthetic peptide
GGYPCHMAQLGELCDLWSWGDIGGRR

SEQ ID NO: 917 - protein, 24 aa, Artificial Sequence
  Description of Artificial Sequence: Synthetic peptide
FYPCWTALLGELCDLEPGPPAMGG

SEQ ID NO: 918 - protein, 24 aa, Artificial Sequence
  Description of Artificial Sequence: Synthetic peptide
WRRWYPCWVAQVGELCDLEIEAGG

SEQ ID NO: 919 - protein, 24 aa, Artificial Sequence
  Description of Artificial Sequence: Synthetic peptide
RQRWYPCWMARLGELCDLDEPTGG

SEQ ID NO: 920 - protein, 24 aa, Artificial Sequence
  Description of Artificial Sequence: Synthetic peptide
WYPCWMAQLGDLCDLEKPVTERGG

SEQ ID NO: 921 - protein, 26 aa, Artificial Sequence
  Description of Artificial Sequence: Synthetic peptide
GGFYPCWTALLGELCDLEPGPPAMGG

SEQ ID NO: 922 - protein, 26 aa, Artificial Sequence
  Description of Artificial Sequence: Synthetic peptide
GGWGTTWRWYPCWMAQLGELCDLEGG

SEQ ID NO: 923 - protein, 25 aa, Artificial Sequence
  Description of Artificial Sequence: Synthetic peptide
GGDVLGDRWYPCWIAKGELCDLDGG

SEQ ID NO: 924 - protein, 19 aa, Artificial Sequence
  Description of Artificial Sequence: Synthetic peptide
GGWPCWIAQLGELCDLDGG

SEQ ID NO: 925 - protein, 20 aa, Artificial Sequence
  Description of Artificial Sequence: Synthetic peptide
GGWYPCWLAKLGELCDLDGG

SEQ ID NO: 926 - protein, 26 aa, Artificial Sequence
  Description of Artificial Sequence: Synthetic peptide
GGWYPCWMAQLGDLCDLEKPVTERGG

SEQ ID NO: 927 - protein, 26 aa, Artificial Sequence
  Description of Artificial Sequence: Synthetic peptide
GGWRRWYPCWVAQVGELCDLEIEAGG

SEQ ID NO: 928 - protein, 26 aa, Artificial Sequence
  Description of Artificial Sequence: Synthetic peptide
GGRQRWYPCWMARLGELCDLDEPTGG

SEQ ID NO: 929 - protein, 24 aa, Artificial Sequence
  Description of Artificial Sequence: Synthetic peptide
GGVQYKKCWMAQLGDLCELDPSGG

SEQ ID NO: 930 - protein, 24 aa, Artificial Sequence
  Description of Artificial Sequence: Synthetic peptide
GGYPCHMAQLGELCDLWSWGDIGG

SEQ ID NO: 931-943 - skipped (13 entries)

SEQ ID NO: 944 - protein, 20 aa, Artificial Sequence
  Description of Artificial Sequence: Synthetic peptide
  MOD_RES (1)..(1): Any amino acid comprising a basic side chain
  MOD_RES (2)..(2): Any amino acid comprising a hydroxyl-containing side chain
  MOD_RES (3)..(3): Any amino acid comprising an acidic side chain or a large hydrophobic side chain
  MOD_RES (4)..(4): Any amino acid comprising a large hydrophobic side chain
  MOD_RES (5)..(5): Any amino acid comprising an acidic side chain or a large hydrophobic side chain
  MOD_RES (7)..(7): Any amino acid comprising an acidic side chain or a polar/neutral side chain
  MOD_RES (8)..(8): Any amino acid comprising an acidic side chain
  MOD_RES (9)..(9): Any amino acid comprising a large hydrophobic side chain or an aromatic side chain
  MOD_RES (10)..(10): Any amino acid comprising an acidic side chain or a polar/neutral side chain
  MOD_RES (17)..(17): Any amino acid comprising a large hydrophobic side chain
  MOD_RES (19)..(19): Any amino acid
  MOD_RES (20)..(20): Any amino acid comprising an acidic side chain
XXXXXCXXXXGVELCWXEXX

SEQ ID NO: 945 - protein, 18 aa, Artificial Sequence
  Description of Artificial Sequence: Synthetic peptide
  MOD_RES (1)..(1): Any amino acid comprising a hydroxyl-containing side chain
  MOD_RES (2)..(2): Any amino acid comprising an acidic side chain or a large hydrophobic side chain
  MOD_RES (3)..(3): Any amino acid comprising a large hydrophobic side chain
  MOD_RES (4)..(4): Any amino acid comprising an acidic side chain or a large hydrophobic side chain
  MOD_RES (6)..(6): Any amino acid comprising an acidic side chain or a polar/neutral side chain
  MOD_RES (7)..(7): Any amino acid comprising an acidic side chain
  MOD_RES (8)..(8): Any amino acid comprising a large hydrophobic side chain or an aromatic side chain
  MOD_RES (9)..(9): Any amino acid comprising an acidic side chain or a polar/neutral side chain
  MOD_RES (16)..(16): Any amino acid comprising a large hydrophobic side chain
  MOD_RES (18)..(18): Any amino acid
XXXXCXXXXGVELCWXEX

SEQ ID NO: 946 - protein, 16 aa, Artificial Sequence
  Description of Artificial Sequence: Synthetic peptide
  MOD_RES (1)..(1): Any amino acid comprising an acidic side chain or a large hydrophobic side chain
  MOD_RES (2)..(2): Any amino acid comprising a large hydrophobic side chain
  MOD_RES (3)..(3): Any amino acid comprising an acidic side chain or a large hydrophobic side chain
  MOD_RES (5)..(5): Any amino acid comprising an acidic side chain or a polar/neutral side chain
  MOD_RES (6)..(6): Any amino acid comprising an acidic side chain
  MOD_RES (7)..(7): Any amino acid comprising a large hydrophobic side chain or an aromatic side chain
  MOD_RES (8)..(8): Any amino acid comprising an acidic side chain or a polar/neutral side chain
  MOD_RES (15)..(15): Any amino acid comprising a large hydrophobic side chain
XXXCXXXXGVELCWXE

SEQ ID NO: 947 - protein, 14 aa, Artificial Sequence
  Description of Artificial Sequence: Synthetic peptide
  MOD_RES (1)..(1): Any amino acid comprising a large hydrophobic side chain
  MOD_RES (2)..(2): Any amino acid comprising an acidic side chain or a large hydrophobic side chain
  MOD_RES (4)..(4): Any amino acid comprising an acidic side chain or a polar/neutral side chain
  MOD_RES (5)..(5): Any amino acid comprising an acidic side chain
  MOD_RES (6)..(6): Any amino acid comprising a large hydrophobic side chain or an aromatic side chain
  MOD_RES (7)..(7): Any amino acid comprising an acidic side chain or a polar/neutral side chain
  MOD_RES (14)..(14): Any amino acid comprising a large hydrophobic side chain
XXCXXXXGVELCWX

SEQ ID NO: 948 - protein, 12 aa, Artificial Sequence
  Description of Artificial Sequence: Synthetic peptide
  MOD_RES (1)..(1): Any amino acid comprising an acidic side chain or a large hydrophobic side chain
  MOD_RES (3)..(3): Any amino acid comprising an acidic side chain or a polar/neutral side chain
  MOD_RES (4)..(4): Any amino acid comprising an acidic side chain
  MOD_RES (5)..(5): Any amino acid comprising a large hydrophobic side chain or an aromatic side chain
  MOD_RES (6)..(6): Any amino acid comprising an acidic side chain or a polar/neutral side chain
XCXXXXGVELCW

SEQ ID NO: 949 - protein, 10 aa, Artificial Sequence
  Description of Artificial Sequence: Synthetic peptide
  MOD_RES (2)..(2): Any amino acid comprising an acidic side chain or a polar/neutral side chain
  MOD_RES (3)..(3): Any amino acid comprising an acidic side chain
  MOD_RES (4)..(4): Any amino acid comprising a large hydrophobic side chain or an aromatic side chain
  MOD_RES (5)..(5): Any amino acid comprising an acidic side chain or a polar/neutral side chain
CXXXXGVELC

SEQ ID NO: 950 - protein, 14 aa, Artificial Sequence
  Description of Artificial Sequence: Synthetic peptide
IECDTSYGVYICWQ

SEQ ID NO: 951 - protein, 14 aa, Artificial Sequence
  Description of Artificial Sequence: Synthetic peptide
IECEEWRGVELCWQ

SEQ ID NO: 952 - protein, 20 aa, Artificial Sequence
  Description of Artificial Sequence: Synthetic peptide
PEGREVVVCRDWYGVELCWQ

SEQ ID NO: 953 - protein, 20 aa, Artificial Sequence
  Description of Artificial Sequence: Synthetic peptide
IWGRTVVECQDWEGVELCWQ

SEQ ID NO: 954 - protein, 20 aa, Artificial Sequence
  Description of Artificial Sequence: Synthetic peptide
LALRKEVVCQEYYGVELCWI

SEQ ID NO: 955 - protein, 20 aa, Artificial Sequence
  Description of Artificial Sequence: Synthetic peptide
HEAREVVVCQDWYGVELCWQ

SEQ ID NO: 956 - protein, 20 aa, Artificial Sequence
  Description of Artificial Sequence: Synthetic peptide
MVNREVVVCEDWYGVELCWQ

SEQ ID NO: 957 - protein, 20 aa, Artificial Sequence
  Description of Artificial Sequence: Synthetic peptide
TANQTVVECQVWGGVELCWQ

SEQ ID NO: 958 - protein, 14 aa, Artificial Sequence
  Description of Artificial Sequence: Synthetic peptide
VECQEWGGVELCWC

SEQ ID NO: 959 - protein, 15 aa, Artificial Sequence
  Description of Artificial Sequence: Synthetic peptide
DVECVDWGGVELCWH

SEQ ID NO: 960 - protein, 14 aa, Artificial Sequence
  Description of Artificial Sequence: Synthetic peptide
IVCEEWRGVELCWL

SEQ ID NO: 961 - protein, 20 aa, Artificial Sequence
  Description of Artificial Sequence: Synthetic peptide
DFERSYVVCQDWDGVELCWI

SEQ ID NO: 962 - protein, 20 aa, Artificial Sequence
  Description of Artificial Sequence: Synthetic peptide
AHSRQEVVCEEWYGVELCWI

SEQ ID NO: 963 - protein, 20 aa, Artificial Sequence
  Description of Artificial Sequence: Synthetic peptide
SAPERWVECEDWQGVELCWV

SEQ ID NO: 964 - protein, 20 aa, Artificial Sequence
  Description of Artificial Sequence: Synthetic peptide
YSRELYVQCEDWEGVELCWI

SEQ ID NO: 965 - protein, 14 aa, Artificial Sequence
  Description of Artificial Sequence: Synthetic peptide
VVCQDWEGVELCWQ

SEQ ID NO: 966 - protein, 15 aa, Artificial Sequence
  Description of Artificial Sequence: Synthetic peptide
DVVCQNWEGVDLCWH

SEQ ID NO: 967 - protein, 20 aa, Artificial Sequence
  Description of Artificial Sequence: Synthetic peptide
SAGRQEVVCQDWNGVELCWI

SEQ ID NO: 968 - protein, 20 aa, Artificial Sequence
  Description of Artificial Sequence: Synthetic peptide
GQGREVVVCHDWYGVELCWQ

SEQ ID NO: 969 - protein, 20 aa, Artificial Sequence
  Description of Artificial Sequence: Synthetic peptide
DWRRSVVECQDWYGVELCWQ

SEQ ID NO: 970 - protein, 15 aa, Artificial Sequence
  Description of Artificial Sequence: Synthetic peptide
DVVCQNWDGVDLCWH

SEQ ID NO: 971 - protein, 20 aa, Artificial Sequence
  Description of Artificial Sequence: Synthetic peptide
TLGRTVVECQDWGGVELCWQ

SEQ ID NO: 972 - protein, 20 aa, Artificial Sequence
  Description of Artificial Sequence: Synthetic peptide
RLLNSVVECLDWEGVELCWQ

SEQ ID NO: 973 - protein, 14 aa, Artificial Sequence
  Description of Artificial Sequence: Synthetic peptide
IVCEDWRGVELCWI

SEQ ID NO: 974 - protein, 14 aa, Artificial Sequence
  Description of Artificial Sequence: Synthetic peptide
VVCQEWEGVELCWC

SEQ ID NO: 975 - protein, 20 aa, Artificial Sequence
  Description of Artificial Sequence: Synthetic peptide
GDRPKEVVCEDWKGVELCWI

SEQ ID NO: 976 - protein, 20 aa, Artificial Sequence
  Description of Artificial Sequence: Synthetic peptide
ERPRSFIECQEWEGVELCWL

SEQ ID NO: 977 - protein, 20 aa, Artificial Sequence
  Description of Artificial Sequence: Synthetic peptide
EGSTTTIECEEWAGVELCWL

SEQ ID NO: 978 - protein, 20 aa, Artificial Sequence
  Description of Artificial Sequence: Synthetic peptide
ANQNTVVECQDWHGVELCWQ

SEQ ID NO: 979 - protein, 20 aa, Artificial Sequence
  Description of Artificial Sequence: Synthetic peptide
RSDDEVVVCQEWEGVELCWQ

SEQ ID NO: 980 - protein, 14 aa, Artificial Sequence
  Description of Artificial Sequence: Synthetic peptide
IECEEWAGVELCWL

SEQ ID NO: 981 - protein, 20 aa, Artificial Sequence
  Description of Artificial Sequence: Synthetic peptide
TWNMSELECQDWNGVEICWH

SEQ ID NO: 982 - protein, 20 aa, Artificial Sequence
  Description of Artificial Sequence: Synthetic peptide
GNDDSYIVCEEWKGVELCWI

SEQ ID NO: 983 - protein, 20 aa, Artificial Sequence
  Description of Artificial Sequence: Synthetic peptide
FAHHGVVECQEWYGVELCWQ

SEQ ID NO: 984 - protein, 20 aa, Artificial Sequence
  Description of Artificial Sequence: Synthetic peptide
LNRSVWIECEEYEGVELCWL

SEQ ID NO: 985 - protein, 20 aa, Artificial Sequence
  Description of Artificial Sequence: Synthetic peptide
WSKKAEVVCEEWGGVEFCWI

SEQ ID NO: 986 - protein, 20 aa, Artificial Sequence
  Description of Artificial Sequence: Synthetic peptide
RSNQTVVECQDWEGVELCWQ

SEQ ID NO: 987 - protein, 20 aa, Artificial Sequence
  Description of Artificial Sequence: Synthetic peptide
VVCQEWEGVELCWYAGECMQ

SEQ ID NO: 988 - protein, 20 aa, Artificial Sequence
  Description of Artificial Sequence: Synthetic peptide
ILCQEFEGVELCWLEESLAE

SEQ ID NO: 989 - protein, 20 aa, Artificial Sequence
  Description of Artificial Sequence: Synthetic peptide
KSQVECQDWEGVELCWVVSE

SEQ ID NO: 990 - protein, 20 aa, Artificial Sequence
  Description of Artificial Sequence: Synthetic peptide
KITVECQDWDGVELCWPTWI

SEQ ID NO: 991 - protein, 20 aa, Artificial Sequence
  Description of Artificial Sequence: Synthetic peptide
RPQIECQEWQGVELCWTREE

SEQ ID NO: 992 - protein, 20 aa, Artificial Sequence
  Description of Artificial Sequence: Synthetic peptide
VSCQEWDGVELCWVDGDLAA

SEQ ID NO: 993 - protein, 20 aa, Artificial Sequence
  Description of Artificial Sequence: Synthetic peptide
IMCQEWDGVELCWLERDKAN

SEQ ID NO: 994 - protein, 20 aa, Artificial Sequence
  Description of Artificial Sequence: Synthetic peptide
GLEIACEDWYGVELCWLRRA

SEQ ID NO: 995 - protein, 24 aa, Artificial Sequence
  Description of Artificial Sequence: Synthetic peptide
GYGVLCQEWQGVELCWPVQREAGV

SEQ ID NO: 996 - protein, 20 aa, Artificial Sequence
  Description of Artificial Sequence: Synthetic peptide
PYGVVCQDWAGVELCWVENR

SEQ ID NO: 997 - protein, 20 aa, Artificial Sequence
  Description of Artificial Sequence: Synthetic peptide
KLTVECQDWDGVELCWVGVE

SEQ ID NO: 998 - protein, 20 aa, Artificial Sequence
  Description of Artificial Sequence: Synthetic peptide
INCQTWNGVELCWVDEGLYQ

SEQ ID NO: 999 - protein, 20 aa, Artificial Sequence
  Description of Artificial Sequence: Synthetic peptide
VVCQEWEGVELCWVEPPLLP

SEQ ID NO: 1000 - protein, 20 aa, Artificial Sequence
  Description of Artificial Sequence: Synthetic peptide
RVQVECEDWNGVELCWPVRV

SEQ ID NO: 1001 - protein, 20 aa, Artificial Sequence
  Description of Artificial Sequence: Synthetic peptide
DRQVVCEEWDGVELCWIEES

SEQ ID NO: 1002 - protein, 20 aa, Artificial Sequence
  Description of Artificial Sequence: Synthetic peptide
KTTVACQDWGGVELCWVERV

SEQ ID NO: 1003 - protein, 20 aa, Artificial Sequence
  Description of Artificial Sequence: Synthetic peptide
RPEVVCQEWEGVELCWISPL

SEQ ID NO: 1004 - protein, 20 aa, Artificial Sequence
  Description of Artificial Sequence: Synthetic peptide
RLGVECQEWEGVDLCWISAF

SEQ ID NO: 1005 - protein, 20 aa, Artificial Sequence
  Description of Artificial Sequence: Synthetic peptide
KPVVVCEEWQGVELCWLEIQ

SEQ ID NO: 1006 - protein, 20 aa, Artificial Sequence
  Description of Artificial Sequence: Synthetic peptide
VVCEVFQGVELCWCENEEFT

SEQ ID NO: 1007 - protein, 20 aa, Artificial Sequence
  Description of Artificial Sequence: Synthetic peptide
TDEVSCQEWEGVELCWIERQ

SEQ ID NO: 1008 - protein, 20 aa, Artificial Sequence
  Description of Artificial Sequence: Synthetic peptide
PVEVRCQEWEGVELCWVVGI

SEQ ID NO: 1009 - protein, 20 aa, Artificial Sequence
  Description of Artificial Sequence: Synthetic peptide
GPEVVCEEFNRVELCWVEYN

SEQ ID NO: 1010 - protein, 20 aa, Artificial Sequence
  Description of Artificial Sequence: Synthetic peptide
KYIVECQEWGGVELCWPEMV

SEQ ID NO: 1011 - protein, 20 aa, Artificial Sequence
  Description of Artificial Sequence: Synthetic peptide
VTCQEYEGVELCWTVGCAYS

SEQ ID NO: 1012 - protein, 21 aa, Artificial Sequence
  Description of Artificial Sequence: Synthetic peptide
VVCQEWEGVELCWQTGPGAHA

SEQ ID NO: 1013 - protein, 20 aa, Artificial Sequence
  Description of Artificial Sequence: Synthetic peptide
IVCEEYNGVELCWVETSVKP

SEQ ID NO: 1014 - protein, 20 aa, Artificial Sequence
  Description of Artificial Sequence: Synthetic peptide
EQQVVCQEWNGVELCWIEAG

SEQ ID NO: 1015 - protein, 20 aa, Artificial Sequence
  Description of Artificial Sequence: Synthetic peptide
QLGVECQNWRGVELCWVSEI

SEQ ID NO: 1016 - protein, 20 aa, Artificial Sequence
  Description of Artificial Sequence: Synthetic peptide
TAEVVCQEWDGVELCWIEVL

SEQ ID NO: 1017 - protein, 20 aa, Artificial Sequence
  Description of Artificial Sequence: Synthetic peptide
SPSIVCEEWAGVELCWVDYS

SEQ ID NO: 1018 - protein, 20 aa, Artificial Sequence
  Description of Artificial Sequence: Synthetic peptide
AVCQDWYGVELCWCMQDILD

SEQ ID NO: 1019 - protein, 20 aa, Artificial Sequence
  Description of Artificial Sequence: Synthetic peptide
VECEEWGGVELCWLADEVMW

SEQ ID NO: 1020 - protein, 20 aa, Artificial Sequence
  Description of Artificial Sequence: Synthetic peptide
HSTVICQDWDGVELCWIEND

SEQ ID NO: 1021 - protein, 20 aa, Artificial Sequence
  Description of Artificial Sequence: Synthetic peptide
KKIVVCQDWGGVELCWTEDD

SEQ ID NO: 1022 - protein, 20 aa, Artificial Sequence
  Description of Artificial Sequence: Synthetic peptide
SVEVVCEEWHGVELCWPVFI

SEQ ID NO: 1023 - protein, 20 aa, Artificial Sequence
  Description of Artificial Sequence: Synthetic peptide
RWAVSCQDWQGIELCWPEWD

SEQ ID NO: 1024 - protein, 20 aa, Artificial Sequence
  Description of Artificial Sequence: Synthetic peptide
RTGVECQDWHGVELCWPVWE

SEQ ID NO: 1025 - protein, 20 aa, Artificial Sequence
  Description of Artificial Sequence: Synthetic peptide
GYGVVCEDFRGVELCWLERK

SEQ ID NO: 1026 - protein, 17 aa, Artificial Sequence
  Description of Artificial Sequence: Synthetic peptide
RTEVECEDWEGVELCWL

SEQ ID NO: 1027 - protein, 19 aa, Artificial Sequence
  Description of Artificial Sequence: Synthetic peptide
ILCEEWQGVELCWLEGGGS

SEQ ID NO: 1028 - protein, 16 aa, Artificial Sequence
  Description of Artificial Sequence: Synthetic peptide
VGIECEEWAGVELCWL

SEQ ID NO: 1029-1031 - skipped (3 entries)

SEQ ID NO: 1032 - protein, 15 aa, Artificial Sequence
  Description of Artificial Sequence: Synthetic peptide
SLLKCYNASTCASVF

SEQ ID NO: 1033 - skipped

SEQ ID NO: 1034 - protein, 12 aa, Artificial Sequence
  Description of Artificial Sequence: Synthetic peptide
CGMAIGDLCMWT

SEQ ID NO: 1035-1041 - skipped (7 entries)

SEQ ID NO: 1042 - protein, 12 aa, Artificial Sequence
  Description of Artificial Sequence: Synthetic peptide
RWGDVGDLLMPL

SEQ ID NO: 1043 - skipped

SEQ ID NO: 1044 - protein, 14 aa, Artificial Sequence
  Description of Artificial Sequence: Synthetic peptide
RSCYYKRPRLWCSE

SEQ ID NO: 1045-1050 - skipped (6 entries)

SEQ ID NO: 1051 - protein, 16 aa, Artificial Sequence
  Description of Artificial Sequence: Synthetic peptide
DCSMWEGVELCWGGRR

SEQ ID NO: 1052 - protein, 20 aa, Artificial Sequence
  Description of Artificial Sequence: Synthetic peptide
GGVVCQDWEGVELCWQGGRR

SEQ ID NO: 1053 - protein, 18 aa, Artificial Sequence
  Description of Artificial Sequence: Synthetic peptide
GGVMCERWQGVELCWLGG

SEQ ID NO: 1054 - protein, 24 aa, Artificial Sequence
  Description of Artificial Sequence: Synthetic peptide
GGRTGVECQDWHGVELCWPVWEGG

SEQ ID NO: 1055 - protein, 20 aa, Artificial Sequence
  Description of Artificial Sequence: Synthetic peptide
GGVGIECEEWAGVELCWLGG

SEQ ID NO: 1056 - protein, 24 aa, Artificial Sequence
  Description of Artificial Sequence: Synthetic peptide
GGTWNMSELECQDWNGVEICWHGG

SEQ ID NO: 1057 - protein, 21 aa, Artificial Sequence
  Description of Artificial Sequence: Synthetic peptide
GGRTEVECEDWEGVELCWLGG

SEQ ID NO: 1058 - protein, 24 aa, Artificial Sequence
  Description of Artificial Sequence: Synthetic peptide
GGWSKKAEVVCEEWGGVEFCWIGG

SEQ ID NO: 1059 - protein, 20 aa, Artificial Sequence
  Description of Artificial Sequence: Synthetic peptide
WSKKAEVVCEEWGGVEFCWI

SEQ ID NO: 1060 - protein, 20 aa, Artificial Sequence
  Description of Artificial Sequence: Synthetic peptide
YSRELYVQCEDWEGVELCWI

SEQ ID NO: 1061-1208 - skipped (148 entries)

SEQ ID NO: 1209 - protein, 18 aa, Artificial Sequence
  Description of Artificial Sequence: Synthetic peptide
GWHPCWIAQLGELCDLEG

SEQ ID NO: 1210 - protein, 20 aa, Artificial Sequence
  Description of Artificial Sequence: Synthetic peptide
GGWHPCWIAQLGELCDLEGG

SEQ ID NO: 1211 - protein, 22 aa, Artificial Sequence
  Description of Artificial Sequence: Synthetic peptide
GGGWHPCWIAQLGELCDLEGGG

SEQ ID NO: 1212 - protein, 284 aa, Artificial Sequence
  Description of Artificial Sequence: Synthetic polypeptide
APLERKSSVECPPCPAPPVAGPSVFLFPPKPKDTLMISRTPEVTCVVVDVSHEDPEVQFNWYVDGVEVHNAKTKPREEQFNSTFRVVSVLTVVHQDWLNGKEYKCKVSNKGLPAPIEKTISKTKGQPREPQVYTLPPSREEMTKNQVSLTCLVKGFYPSDIAVEWESNGQPENNYKTTPPMLDSDGSFFLYSKLTVDKSRWQQGNVFSCSVMHEALHNHYTQKSLSLSPGARTGGGGSGGGGSGGWYPCWMAQLGELCDLDGGGGSGGVVCQDWEGVELCWQGG

SEQ ID NO: 1213 - protein, 286 aa, Artificial Sequence
  Description of Artificial Sequence: Synthetic polypeptide
AEPKSSDKTHTCPPCPAPEAAGGPSVFLFPPKPKDTLMISRTPEVTCVVVDVSHEDPEVKFNWYVDGVEVHNAKTKPREEQYNSTYRVVSVLTVLHQDWLNGKEYKCKVSNKALGAPIEKTISKAKGQPREPQVYTLPPSREEMTKNQVSLTCLVKGFYPSDIAVEWESNGQPENNYKTTPPVLDSDGSFFLYSKLTVDKSRWQQGNVFSCSVMHEALHNHYTQKSLSLSPGARTGGGGSGGGGSGGWYPCWMAQLGELCDLDGGGGSGGVVCQDWEGVELCWQGG

SEQ ID NO: 1214 - protein, 278 aa, Artificial Sequence
  Description of Artificial Sequence: Synthetic polypeptide
APPCPPCPAPEFEGGPSVFLFPPKPKDTLMISRTPEVTCVVVDVSQEDPEVQFNWYVDGVEVHNAKTKPREEQFNSTYRVVSVLTVLHQDWLNGKEYKCKVSNKGLGSSIEKTISKAKGQPREPQVYTLPPSQEEMTKNQVSLTCLVKGFYPSDIAVEWESNGQPENNYKTTPPVLDSDGSFFLYSRLTVDKSRWQEGNVFSCSVMHEALHNHYTQKSLSLSLGARTGGGGSGGGGSGGWYPCWMAQLGELCDLDGGGGSGGVVCQDWEGVELCWQGG

SEQ ID NO: 1215 - protein, 283 aa, Artificial Sequence
  Description of Artificial Sequence: Synthetic polypeptide
GGWYPCWMAQLGELCDLDGGGGSGGVVCQDWEGVELCWQGGGGSGGGGSGGGGSRSDKTHTCPPCPAPELLGGPSVFLFPPKPKDTLMISRTPEVTCVVVDVSHEDPEVKFNWYVDGVEVHNAKTKPREEQYNSTYRVVSVLTVLHQDWLNGKEYKCKVSNKALPAPIEKTISKAKGQPREPQVYTLPPSREEMTKNQVSLTCLVKGFYPSDIAVEWESNGQPENNYKTTPPVLDSDGSFFLYSKLTVDKSRWQQGNVFSCSVMHEALHNHYTQKSLSLSPGK

SEQ ID NO: 1216 - protein, 292 aa, Artificial Sequence
  Description of Artificial Sequence: Synthetic polypeptide
GITVAEPKSCDKTHTCPPCPAPEAAGGPSVFLFPPKPKDTLMISRTPEVTCVVVDVSHEDPEVKFNWYVDGVEVHNAKTKPREEQYNSTYRVVSVLTVLHQDWLNGKEYKCKVSNKALPAPIEKTISKAKGQPREPQVYTLPPSREEMTKNQVSLWCLVKGFYPSDIAVEWESNGQPENNYKTTPPVLDSDGSFFLYSKLTVDKSRWQQGNVFSCSVMHEALHNHYTQKSLSLSPGGGGGSGGGGSGGGGSGGWYPCWMAQLGELCDLDGGGGSGGVVCQDWEGVELCWQGG

SEQ ID NO: 1217 - protein, 231 aa, Artificial Sequence
  Description of Artificial Sequence: Synthetic polypeptide
EPKSCDKTHTCPPCPAPEAAGGPSVFLFPPKPKDTLMISRTPEVTCVVVDVSHEDPEVKFNWYVDGVEVHNAKTKPREEQYNSTYRVVSVLTVLHQDWLNGKEYKCKVSNKALPAPIEKTISKAKGQPREPQVYTLPPSREEMTKNQVSLSCAVKGFYPSDIAVEWESNGQPENNYKTTPPVLDSDGSFFLVSKLTVDKSRWQQGNVFSCSVMHEALHNHYTQKSLSLSPG

SEQ ID NO: 1218 - protein, 218 aa, Artificial Sequence
  Description of Artificial Sequence: Synthetic polypeptide
EIVLTQSPATLSLSPGERATLSCRASKGVSTSGYSYLHWYQQKPGQAPRLLIYLASYLESGVPARFSGSGSGTDFTLTISSLEPEDFAVYYCQHSRDLPLTFGGGTKVEIKRTVAAPSVFIFPPSDEQLKSGTASVVCLLNNFYPREAKVQWKVDNALQSGNSQESVTEQDSKDSTYSLSSTLTLSKADYEKHKVYACEVTHQGLSSPVTKSFNRGEC

SEQ ID NO: 1219 - protein, 498 aa, Artificial Sequence
  Description of Artificial Sequence: Synthetic polypeptide
QVQLVQSGVEVKKPGASVKVSCKASGYTFTNYYMYWVRQAPGQGLEWMGGINPSNGGTNFNEKFKNRVTLTTDSSTTTAYMELKSLQFDDTAVYYCARRDYRFDMGFDYWGQGTTVTVSSASTKGPSVFPLAPCSRSTSESTAALGCLVKDYFPEPVTVSWNSGALTSGVHTFPAVLQSSGLYSLSSVVTVPSSSLGTKTYTCNVDHKPSNTKVDKRVESKYGPPCPPCPAPEFLGGPSVFLFPPKPKDTLMISRTPEVTCVVVDVSQEDPEVQFNWYVDGVEVHNAKTKPREEQFNSTYRVVSVLTVLHQDWLNGKEYKCKVSNKGLPSSIEKTISKAKGQPREPQVYTLPPSQEEMTKNQVSLTCLVKGFYPSDIAVEWESNGQPENNYKTTPPVLDSDGSFFLYSRLTVDKSRWQEGNVFSCSVMHEALHNHYTQKSLSLSLGAGGGGSGGGGSGGWYPCWMAQLGELCDLDGGGGSGGVVCQDWEGVELCWQGG

SEQ ID NO: 1220 - protein, 214 aa, Artificial Sequence
  Description of Artificial Sequence: Synthetic polypeptide
DIQMTQSPSSLSASVGDSITITCRASLSINTFLNWYQQKPGKAPNLLIYAASSLHGGVPSRFSGSGSGTDFTLTIRTLQPEDFATYYCQQSSNTPFTFGPGTVVDFRRTVAAPSVFIFPPSDEQLKSGTASVVCLLNNFYPREAKVQWKVDNALQSGNSQESVTEQDSKDSTYSLSSTLTLSKADYEKHKVYACEVTHQGLSSPVTKSFNRGEC

SEQ ID NO: 1221 - protein, 495 aa, Artificial Sequence
  Description of Artificial Sequence: Synthetic polypeptide
EVQLLESGGVLVQPGGSLRLSCAASGFTFSNFGMTWVRQAPGKGLEWVSGISGGGRDTYFADSVKGRFTISRDNSKNTLYLQMNSLKGEDTAVYYCVKWGNIYFDYWGQGTLVTVSSASTKGPSVFPLAPCSRSTSESTAALGCLVKDYFPEPVTVSWNSGALTSGVHTFPAVLQSSGLYSLSSVVTVPSSSLGTKTYTCNVDHKPSNTKVDKRVESKYGPPCPPCPAPEFLGGPSVFLFPPKPKDTLMISRTPEVTCVVVDVSQEDPEVQFNWYVDGVEVHNAKTKPREEQFNSTYRVVSVLTVLHQDWLNGKEYKCKVSNKGLPSSIEKTISKAKGQPREPQVYTLPPSQEEMTKNQVSLTCLVKGFYPSDIAVEWESNGQPENNYKTTPPVLDSDGSFFLYSRLTVDKSRWQEGNVFSCSVMHEALHNHYTQKSLSLSLGAGGGGSGGGGSGGWYPCWMAQLGELCDLDGGGGSGGVVCQDWEGVELCWQGG

SEQ ID NO: 1222 - protein, 213 aa, Artificial Sequence
  Description of Artificial Sequence: Synthetic polypeptide
DIQMTQSPSTLSASVGDRVTITCSASSSISYMHWYQQKPGKAPKLLIYTTSNLASGVPARFSGSGSGTEFTLTISSLQPDDFATYYCHQRSTYPLTFGQGTKVEVKRTVAAPSVFIFPPSDEQLKSGTASVVCLLNNFYPREAKVQWKVDNALQSGNSQESVTEQDSKDSTYSLSSTLTLSKADYEKHKVYACEVTHQGLSSPVTKSFNRGEC

SEQ ID NO: 1223 - protein, 497 aa, Artificial Sequence
  Description of Artificial Sequence: Synthetic polypeptide
QVQLVQSGAEVKKPGSSVKVSCKASGYTFTSYRMHWVRQAPGQGLEWIGYINPSTGYTEYNQKFKDKATITADESTNTAYMELSSLRSEDTAVYYCARGGGVFDYWGQGTLVTVSSASTKGPSVFPLAPSSKSTSGGTAALGCLVKDYFPEPVTVSWNSGALTSGVHTFPAVLQSSGLYSLSSVVTVPSSSLGTQTYICNVNHKPSNTKVDKKVEPKSCDKTHTCPPCPAPELLGGPSVFLFPPKPKDTLMISRTPEVTCVVVDVSHEDPEVKFNWYVDGVEVHNAKTKPREEQYNSTYRVVSVLTVLHQDWLNGKEYKCKVSNKALPAPIEKTISKAKGQPREPQVYTLPPSRDELTKNQVSLTCLVKGFYPSDIAVEWESNGQPENNYKTTPPVLDSDGSFFLYSKLTVDKSRWQQGNVFSCSVMHEALHNHYTQKSLSLSPGAGGGGSGGGGSGGWYPCWMAQLGELCDLDGGGGSGGVVCQDWEGVELCWQGG

SEQ ID NO: 1224 - protein, 288 aa, Artificial Sequence
  Description of Artificial Sequence: Synthetic polypeptide
DKTHTCPPCPAPELLGGPSVFLFPPKPKDTLMISRTPEVTCVVVDVSHEDPEVKFNWYVDGVEVHNAKTKPREEQYASTYRVVSVLTVLHQDWLNGKEYKCKVSNKALPAPIEKTISKAKGQPREPQVYTLPPSRDELTKNQVSLTCLVKGFYPSDIAVEWESNGQPENNYKTTPPVLDSDGSFFLYSKLTVDKSRWQQGNVFSCSVMHEALHNHYTQKSLSLSPGAGSGSGSGSGSGSGSGSGSGSGGWYPCWMAQLGELCDLDGGGGSGGVVCQDWEGVELCWQGG

SEQ ID NO: 1225 - protein, 289 aa, Artificial Sequence
  Description of Artificial Sequence: Synthetic polypeptide
ERKSSVECPPCPAPPVAGPSVFLFPPKPKDTLMISRTPEVTCVVVDVSHEDPEVQFNWYVDGVEVHNAKTKPREEQFNSTFRVVSVLTVVHQDWLNGKEYKCKVSNKGLPAPIEKTISKTKGQPREPQVYTLPPSREEMTKNQVSLTCLVKGFYPSDISVEWESNGQPENNYKTTPPMLDSDGSFFLYSKLTVDKSRWQQGNVFSCSVMHEALHNHYTQKSLSLSPGAGSGSGSGSGSGSGSGSGSGSGGWYPCWMAQLGELCDLDGGGGSGGVVCQDWEGVELCWQGG

SEQ ID NO: 1226 - protein, 289 aa, Artificial Sequence
  Description of Artificial Sequence: Synthetic polypeptide
ERKSSVECPPCPAPPVAGPSVFLFPPKPKDTLMISRTPEVTCVVVDVSHEDPEVQFNWYVDGVEVHNAKTKPREEQFNSTFRVVSVLTVVHQDWLNGKEYKCKVSNKGLPAPIEKTISKTKGQPREPQVYTLPPSREEMTKNQVSLTCLVKGFYPSDISVEWESNGQPENNYKTTPPMLDSDGSFFLYSKLTVDKSRWQQGNVFSCSVMHEALHNHYTQKSLSLSPGAPAPAPAPAPAPAPAPAPAPAGGWYPCWMAQLGELCDLDGGGGSGGVVCQDWEGVELCWQGG

SEQ ID NO: 1227 - protein, 279 aa, Artificial Sequence
  Description of Artificial Sequence: Synthetic polypeptide
APLERKSSVECPPCPAPPVAGPSVFLFPPKPKDTLMISRTPEVTCVVVDVSHEDPEVQFNWYVDGVEVHNAKTKPREEQFNSTFRVVSVLTVVHQDWLNGKEYKCKVSNKGLPAPIEKTISKTKGQPREPQVYTLPPSREEMTKNQVSLTCLVKGFYPSDIAVEWESNGQPENNYKTTPPMLDSDGSFFLYSKLTVDKSRWQQGNVFSCSVMHEALHNHYTQKSLSLSPGARTGGGGSGGWYPCWMAQLGELCDLDGGGGSGGVVCQDWEGVELCWQGG

SEQ ID NO: 1228 - protein, 289 aa, Artificial Sequence
  Description of Artificial Sequence: Synthetic polypeptide
APLERKSSVECPPCPAPPVAGPSVFLFPPKPKDTLMISRTPEVTCVVVDVSHEDPEVQFNWYVDGVEVHNAKTKPREEQFNSTFRVVSVLTVVHQDWLNGKEYKCKVSNKGLPAPIEKTISKTKGQPREPQVYTLPPSREEMTKNQVSLTCLVKGFYPSDIAVEWESNGQPENNYKTTPPMLDSDGSFFLYSKLTVDKSRWQQGNVFSCSVMHEALHNHYTQKSLSLSPGARTGGGGSGGGGSGGGGSGGWYPCWMAQLGELCDLDGGGGSGGVVCQDWEGVELCWQGG

SEQ ID NO: 1229 - protein, 294 aa, Artificial Sequence
  Description of Artificial Sequence: Synthetic polypeptide
APLERKSSVECPPCPAPPVAGPSVFLFPPKPKDTLMISRTPEVTCVVVDVSHEDPEVQFNWYVDGVEVHNAKTKPREEQFNSTFRVVSVLTVVHQDWLNGKEYKCKVSNKGLPAPIEKTISKTKGQPREPQVYTLPPSREEMTKNQVSLTCLVKGFYPSDIAVEWESNGQPENNYKTTPPMLDSDGSFFLYSKLTVDKSRWQQGNVFSCSVMHEALHNHYTQKSLSLSPGARTGGGGSGGGGSGGGGSGGGGSGGWYPCWMAQLGELCDLDGGGGSGGVVCQDWEGVELCWQGG

SEQ ID NO: 1230 - protein, 276 aa, Artificial Sequence
  Description of Artificial Sequence: Synthetic polypeptide
APLERKSSVECPPCPAPPVAGPSVFLFPPKPKDTLMISRTPEVTCVVVDVSHEDPEVQFNWYVDGVEVHNAKTKPREEQFNSTFRVVSVLTVVHQDWLNGKEYKCKVSNKGLPAPIEKTISKTKGQPREPQVYTLPPSREEMTKNQVSLTCLVKGFYPSDIAVEWESNGQPENNYKTTPPMLDSDGSFFLYSKLTVDKSRWQQGNVFSCSVMHEALHNHYTQKSLSLSPGARTGGGGWYPCWMAQLGELCDLDGGGGSGGVVCQDWEGVELCWQGG

SEQ ID NO: 1231 - protein, 279 aa, Artificial Sequence
  Description of Artificial Sequence: Synthetic polypeptide
APLERKSSVECPPCPAPPVAGPSVFLFPPKPKDTLMISRTPEVTCVVVDVSHEDPEVQFNWYVDGVEVHNAKTKPREEQFNSTFRVVSVLTVVHQDWLNGKEYKCKVSNKGLPAPIEKTISKTKGQPREPQVYTLPPSREEMTKNQVSLTCLVKGFYPSDIAVEWESNGQPENNYKTTPPMLDSDGSFFLYSKLTVDKSRWQQGNVFSCSVMHEALHNHYTQKSLSLSPGARTGGGGGGGWYPCWMAQLGELCDLDGGGGSGGVVCQDWEGVELCWQGG

SEQ ID NO: 1232 - protein, 294 aa, Artificial Sequence
  Description of Artificial Sequence: Synthetic polypeptide
APLERKSSVECPPCPAPPVAGPSVFLFPPKPKDTLMISRTPEVTCVVVDVSHEDPEVQFNWYVDGVEVHNAKTKPREEQFNSTFRVVSVLTVVHQDWLNGKEYKCKVSNKGLPAPIEKTISKTKGQPREPQVYTLPPSREEMTKNQVSLTCLVKGFYPSDIAVEWESNGQPENNYKTTPPMLDSDGSFFLYSKLTVDKSRWQQGNVFSCSVMHEALHNHYTQKSLSLSPGARTGSGSGSGSGSGSGSGSGSGSGGWYPCWMAQLGELCDLDGGGGSGGVVCQDWEGVELCWQGG

SEQ ID NO: 1233 - protein, 284 aa, Artificial Sequence
  Description of Artificial Sequence: Synthetic polypeptide
APLERKSSVECPPCPAPPVAGPSVFLFPPKPKDTLMISRTPEVTCVVVDVSHEDPEVQFNWYVDGVEVHNAKTKPREEQFNSTFRVVSVLTVVHQDWLNGKEYKCKVSNKGLPAPIEKTISKTKGQPREPQVYTLPPSREEMTKNQVSLTCLVKGFYPSDIAVEWESNGQPENNYKTTPPMLDSDGSFFLYSKLTVDKSRWQQGNVFSCSVMHEALHNHYTQKSLSLSPGARTPAPAPAPAPAGGWYPCWMAQLGELCDLDGGGGSGGVVCQDWEGVELCWQGG

SEQ ID NO: 1234 - protein, 294 aa, Artificial Sequence
  Description of Artificial Sequence: Synthetic polypeptide
APLERKSSVECPPCPAPPVAGPSVFLFPPKPKDTLMISRTPEVTCVVVDVSHEDPEVQFNWYVDGVEVHNAKTKPREEQFNSTFRVVSVLTVVHQDWLNGKEYKCKVSNKGLPAPIEKTISKTKGQPREPQVYTLPPSREEMTKNQVSLTCLVKGFYPSDIAVEWESNGQPENNYKTTPPMLDSDGSFFLYSKLTVDKSRWQQGNVFSCSVMHEALHNHYTQKSLSLSPGARTPAPAPAPAPAPAPAPAPAPAGGWYPCWMAQLGELCDLDGGGGSGGVVCQDWEGVELCWQGG

SEQ ID NO: 1235 - protein, 288 aa, Artificial Sequence
  Description of Artificial Sequence: Synthetic polypeptide
APLERKSSVECPPCPAPPVAGPSVFLFPPKPKDTLMISRTPEVTCVVVDVSHEDPEVQFNWYVDGVEVHNAKTKPREEQFNSTFRVVSVLTVVHQDWLNGKEYKCKVSNKGLPAPIEKTISKTKGQPREPQVYTLPPSREEMTKNQVSLTCLVKGFYPSDIAVEWESNGQPENNYKTTPPMLDSDGSFFLYSKLTVDKSRWQQGNVFSCSVMHEALHNHYTQKSLSLSPGARTPAPAPAPAPAPAPAGGWYPCWMAQLGELCDLDGGGGSGGVVCQDWEGVELCWQGG

SEQ ID NO: 1236 - protein, 288 aa, Artificial Sequence
  Description of Artificial Sequence: Synthetic polypeptide
APLERKSSVECPPCPAPPVAGPSVFLFPPKPKDTLMISRTPEVTCVVVDVSHEDPEVQFNWYVDGVEVHNAKTKPREEQFNSTFRVVSVLTVVHQDWLNGKEYKCKVSNKGLPAPIEKTISKTKGQPREPQVYTLPPSREEMTKNQVSLTCLVKGFYPSDIAVEWESNGQPENNYKTTPPMLDSDGSFFLYSKLTVDKSRWQQGNVFSCSVMHEALHNHYTQKSLSLSPGARTGGGGSGGGGSGGVQYKKCWMAQLGDLCELDPSGGGGSGGVVCQDWEGVELCWQGG

SEQ ID NO: 1237 - protein, 288 aa, Artificial Sequence
  Description of Artificial Sequence: Synthetic polypeptide
APLERKSSVECPPCPAPPVAGPSVFLFPPKPKDTLMISRTPEVTCVVVDVSHEDPEVQFNWYVDGVEVHNAKTKPREEQFNSTFRVVSVLTVVHQDWLNGKEYKCKVSNKGLPAPIEKTISKTKGQPREPQVYTLPPSREEMTKNQVSLTCLVKGFYPSDIAVEWESNGQPENNYKTTPPMLDSDGSFFLYSKLTVDKSRWQQGNVFSCSVMHEALHNHYTQKSLSLSPGARTGGGGSGGGGSGGYPCHMAQLGELCDLWSWGDIGGGGSGGVVCQDWEGVELCWQGG

SEQ ID NO: 1238 - protein, 282 aa, Artificial Sequence
  Description of Artificial Sequence: Synthetic polypeptide
APLERKSSVECPPCPAPPVAGPSVFLFPPKPKDTLMISRTPEVTCVVVDVSHEDPEVQFNWYVDGVEVHNAKTKPREEQFNSTFRVVSVLTVVHQDWLNGKEYKCKVSNKGLPAPIEKTISKTKGQPREPQVYTLPPSREEMTKNQVSLTCLVKGFYPSDIAVEWESNGQPENNYKTTPPMLDSDGSFFLYSKLTVDKSRWQQGNVFSCSVMHEALHNHYTQKSLSLSPGARTGGGGSGGGGSGGYPCWMAQLGELCDLGGGGSGGVVCQDWEGVELCWQGG

SEQ ID NO: 1239 - protein, 290 aa, Artificial Sequence
  Description of Artificial Sequence: Synthetic polypeptide
APLERKSSVECPPCPAPPVAGPSVFLFPPKPKDTLMISRTPEVTCVVVDVSHEDPEVQFNWYVDGVEVHNAKTKPREEQFNSTFRVVSVLTVVHQDWLNGKEYKCKVSNKGLPAPIEKTISKTKGQPREPQVYTLPPSREEMTKNQVSLTCLVKGFYPSDIAVEWESNGQPENNYKTTPPMLDSDGSFFLYSKLTVDKSRWQQGNVFSCSVMHEALHNHYTQKSLSLSPGARTGGGGSGGGGSGGWYPCWMAQLGELCDLDGGGGSGGWSKKAEVVCEEWGGVEFCWIGG

SEQ ID NO: 1240 - protein, 290 aa, Artificial Sequence
  Description of Artificial Sequence: Synthetic polypeptide
APLERKSSVECPPCPAPPVAGPSVFLFPPKPKDTLMISRTPEVTCVVVDVSHEDPEVQFNWYVDGVEVHNAKTKPREEQFNSTFRVVSVLTVVHQDWLNGKEYKCKVSNKGLPAPIEKTISKTKGQPREPQVYTLPPSREEMTKNQVSLTCLVKGFYPSDIAVEWESNGQPENNYKTTPPMLDSDGSFFLYSKLTVDKSRWQQGNVFSCSVMHEALHNHYTQKSLSLSPGARTGGGGSGGGGSGGWYPCWMAQLGELCDLDGGGGSGGRTGVECQDWHGVELCWPVWEGG

SEQ ID NO: 1241 - protein, 286 aa, Artificial Sequence
  Description of Artificial Sequence: Synthetic polypeptide
APLERKSSVECPPCPAPPVAGPSVFLFPPKPKDTLMISRTPEVTCVVVDVSHEDPEVQFNWYVDGVEVHNAKTKPREEQFNSTFRVVSVLTVVHQDWLNGKEYKCKVSNKGLPAPIEKTISKTKGQPREPQVYTLPPSREEMTKNQVSLTCLVKGFYPSDIAVEWESNGQPENNYKTTPPMLDSDGSFFLYSKLTVDKSRWQQGNVFSCSVMHEALHNHYTQKSLSLSPGARTGGGGSGGGGSGGWYPCWMAQLGELCDLDGGGGSGGVGIECEEWAGVELCWLGG

SEQ ID NO: 1242 - protein, 290 aa, Artificial Sequence
  Description of Artificial Sequence: Synthetic polypeptide
APLERKSSVECPPCPAPPVAGPSVFLFPPKPKDTLMISRTPEVTCVVVDVSHEDPEVQFNWYVDGVEVHNAKTKPREEQFNSTFRVVSVLTVVHQDWLNGKEYKCKVSNKGLPAPIEKTISKTKGQPREPQVYTLPPSREEMTKNQVSLTCLVKGFYPSDIAVEWESNGQPENNYKTTPPMLDSDGSFFLYSKLTVDKSRWQQGNVFSCSVMHEALHNHYTQKSLSLSPGARTGGGGSGGGGSGGWYPCWMAQLGELCDLDGGGGSGGTWNMSELECQDWNGVEICWHGG

SEQ ID NO: 1243 - protein, 287 aa, Artificial Sequence
  Description of Artificial Sequence: Synthetic polypeptide
APLERKSSVECPPCPAPPVAGPSVFLFPPKPKDTLMISRTPEVTCVVVDVSHEDPEVQFNWYVDGVEVHNAKTKPREEQFNSTFRVVSVLTVVHQDWLNGKEYKCKVSNKGLPAPIEKTISKTKGQPREPQVYTLPPSREEMTKNQVSLTCLVKGFYPSDIAVEWESNGQPENNYKTTPPMLDSDGSFFLYSKLTVDKSRWQQGNVFSCSVMHEALHNHYTQKSLSLSPGARTGGGGSGGGGSGGWYPCWMAQLGELCDLDGGGGSGGRTEVECEDWEGVELCWLGG

SEQ ID NO: 1244 - protein, 290 aa, Artificial Sequence
  Description of Artificial Sequence: Synthetic polypeptide
APLERKSSVECPPCPAPPVAGPSVFLFPPKPKDTLMISRTPEVTCVVVDVSHEDPEVQFNWYVDGVEVHNAKTKPREEQFNSTFRVVSVLTVVHQDWLNGKEYKCKVSNKGLPAPIEKTISKTKGQPREPQVYTLPPSREEMTKNQVSLTCLVKGFYPSDIAVEWESNGQPENNYKTTPPMLDSDGSFFLYSKLTVDKSRWQQGNVFSCSVMHEALHNHYTQKSLSLSPGARTGGGGSGGGGSGGFYPCWTALLGELCDLEPGPPAMGGGGSGGVVCQDWEGVELCWQGG

SEQ ID NO: 1245 - protein, 290 aa, Artificial Sequence
  Description of Artificial Sequence: Synthetic polypeptide
APLERKSSVECPPCPAPPVAGPSVFLFPPKPKDTLMISRTPEVTCVVVDVSHEDPEVQFNWYVDGVEVHNAKTKPREEQFNSTFRVVSVLTVVHQDWLNGKEYKCKVSNKGLPAPIEKTISKTKGQPREPQVYTLPPSREEMTKNQVSLTCLVKGFYPSDIAVEWESNGQPENNYKTTPPMLDSDGSFFLYSKLTVDKSRWQQGNVFSCSVMHEALHNHYTQKSLSLSPGARTGGGGSGGGGSGGWGTTWRWYPCWMAQLGELCDLEGGGGSGGVVCQDWEGVELCWQGG

SEQ ID NO: 1246 - protein, 290 aa, Artificial Sequence
  Description of Artificial Sequence: Synthetic polypeptide
APLERKSSVECPPCPAPPVAGPSVFLFPPKPKDTLMISRTPEVTCVVVDVSHEDPEVQFNWYVDGVEVHNAKTKPREEQFNSTFRVVSVLTVVHQDWLNGKEYKCKVSNKGLPAPIEKTISKTKGQPREPQVYTLPPSREEMTKNQVSLTCLVKGFYPSDIAVEWESNGQPENNYKTTPPMLDSDGSFFLYSKLTVDKSRWQQGNVFSCSVMHEALHNHYTQKSLSLSPGARTGGGGSGGGGSGGDVLGDRWYPCWIAKLGELCDLDGGGGSGGVVCQDWEGVELCWQGG

SEQ ID NO: 1247 - protein, 284 aa, Artificial Sequence
  Description of Artificial Sequence: Synthetic polypeptide
APLERKSSVECPPCPAPPVAGPSVFLFPPKPKDTLMISRTPEVTCVVVDVSHEDPEVQFNWYVDGVEVHNAKTKPREEQFNSTFRVVSVLTVVHQDWLNGKEYKCKVSNKGLPAPIEKTISKTKGQPREPQVYTLPPSREEMTKNQVSLTCLVKGFYPSDIAVEWESNGQPENNYKTTPPMLDSDGSFFLYSKLTVDKSRWQQGNVFSCSVMHEALHNHYTQKSLSLSPGARTGGGGSGGGGSGGWYPCWIAQLGELCDLDGGGGSGGVVCQDWEGVELCWQGG

SEQ ID NO: 1248 - protein, 284 aa, Artificial Sequence
  Description of Artificial Sequence: Synthetic polypeptide
APLERKSSVECPPCPAPPVAGPSVFLFPPKPKDTLMISRTPEVTCVVVDVSHEDPEVQFNWYVDGVEVHNAKTKPREEQFNSTFRVVSVLTVVHQDWLNGKEYKCKVSNKGLPAPIEKTISKTKGQPREPQVYTLPPSREEMTKNQVSLTCLVKGFYPSDIAVEWESNGQPENNYKTTPPMLDSDGSFFLYSKLTVDKSRWQQGNVFSCSVMHEALHNHYTQKSLSLSPGARTGGGGSGGGGSGGWYPCWLAKLGELCDLDGGGGSGGVVCQDWEGVELCWQGG

SEQ ID NO: 1249 - protein, 290 aa, Artificial Sequence
  Description of Artificial Sequence: Synthetic polypeptide
APLERKSSVECPPCPAPPVAGPSVFLFPPKPKDTLMISRTPEVTCVVVDVSHEDPEVQFNWYVDGVEVHNAKTKPREEQFNSTFRVVSVLTVVHQDWLNGKEYKCKVSNKGLPAPIEKTISKTKGQPREPQVYTLPPSREEMTKNQVSLTCLVKGFYPSDIAVEWESNGQPENNYKTTPPMLDSDGSFFLYSKLTVDKSRWQQGNVFSCSVMHEALHNHYTQKSLSLSPGARTGGGGSGGGGSGGWYPCWMAQLGDLCDLEKPVTERGGGGSGGVVCQDWEGVELCWQGG

SEQ ID NO: 1250 - protein, 290 aa, Artificial Sequence
  Description of Artificial Sequence: Synthetic polypeptide
APLERKSSVECPPCPAPPVAGPSVFLFPPKPKDTLMISRTPEVTCVVVDVSHEDPEVQFNWYVDGVEVHNAKTKPREEQFNSTFRVVSVLTVVHQDWLNGKEYKCKVSNKGLPAPIEKTISKTKGQPREPQVYTLPPSREEMTKNQVSLTCLVKGFYPSDIAVEWESNGQPENNYKTTPPMLDSDGSFFLYSKLTVDKSRWQQGNVFSCSVMHEALHNHYTQKSLSLSPGARTGGGGSGGGGSGGWRRWYPCWVAQVGELCDLEIEAGGGGSGGVVCQDWEGVELCWQGG

SEQ ID NO: 1251 - protein, 290 aa, Artificial Sequence
  Description of Artificial Sequence: Synthetic polypeptide
APLERKSSVECPPCPAPPVAGPSVFLFPPKPKDTLMISRTPEVTCVVVDVSHEDPEVQFNWYVDGVEVHNAKTKPREEQFNSTFRVVSVLTVVHQDWLNGKEYKCKVSNKGLPAPIEKTISKTKGQPREPQVYTLPPSREEMTKNQVSLTCLVKGFYPSDIAVEWESNGQPENNYKTTPPMLDSDGSFFLYSKLTVDKSRWQQGNVFSCSVMHEALHNHYTQKSLSLSPGARTGGGGSGGGGSGGRQRWYPCWMARLGELCDLDEPTGGGGSGGVVCQDWEGVELCWQGG

SEQ ID NO: 1252 - protein, 648 aa, Artificial Sequence
  Description of Artificial Sequence: Synthetic polypeptide
GGHHHHHHGGDAHKSEVAHRFKDLGEENFKALVLIAFAQYLQQCPFEDHVKLVNEVTEFAKTCVADESAENCDKSLHTLFGDKLCTVATLRETYGEMADCCAKQEPERNECFLQHKDDNPNLPRLVRPEVDVMCTAFHDNEETFLKKYLYEIARRHPYFYAPELLFFAKRYKAAFTECCQAADKAACLLPKLDELRDEGKASSAKQRLKCASLQKFGERAFKAWAVARLSQRFPKAEFAEVSKLVTDLTKVHTECCHGDLLECADDRADLAKYICENQDSISSKLKECCEKPLLEKSHCIAEVENDEMPADLPSLAADFVESKDVCKNYAEAKDVFLGMFLYEYARRHPDYSVVLLLRLAKTYETTLEKCCAAADPHECYAKVFDEFKPLVEEPQNLIKQNCELFEQLGEYKFQNALLVRYTKKVPQVSTPTLVEVSRNLGKVGSKCCKHPEAKRMPCAEDYLSVVLNQLCVLHEKTPVSDRVTKCCTESLVNRRPCFSALEVDETYVPKEFNAETFTFHADICTLSEKERQIKKQTALVELVKHKPKATKEQLKAVMDDFAAFVEKCCKADDKETCFAEEGKKLVAASQAALGLRTGGGGSGGGGSGGWYPCWMAQLGELCDLDGGGGSGGVVCQDWEGVELCWQGG

SEQ ID NO: 1253-1262 - skipped (10 entries)

SEQ ID NO: 1263 - protein, 41 aa, Artificial Sequence
  Description of Artificial Sequence: Synthetic polypeptide
GGWYPCWMAQLGELCDLDGGGGSGGVVCQDWEGVELCWQGG

SEQ ID NO: 1264 - protein, 37 aa, Artificial Sequence
  Description of Artificial Sequence: Synthetic polypeptide
WYPCWMAQLGELCDLDGGGGSGGVVCQDWEGVELCWQ

SEQ ID NO: 1265 - protein, 54 aa, Artificial Sequence
  Description of Artificial Sequence: Synthetic polypeptide
  MOD_RES (19)..(38): Any amino acid
  SITE (19)..(38): This region may encompass 1-20 residues
WYPCWMAQLGELCDLDGGXXXXXXXXXXXXXXXXXXXXGGVVCQDWEGVELCWQ

SEQ ID NO: 1266 - protein, 60 aa, Artificial Sequence
  Description of Artificial Sequence: Synthetic polypeptide
  MOD_RES (17)..(46): Any amino acid
  SITE (17)..(46): This region may encompass 1-30 residues
WYPCWMAQLGELCDLDXXXXXXXXXXXXXXXXXXXXXXXXXXXXXXVVCQDWEGVELCWQ

SEQ ID NO: 1267 - protein, 39 aa, Artificial Sequence
  Description of Artificial Sequence: Synthetic polypeptide
GWYPCWMAQLGELCDLDGGGGSGGVVCQDWEGVELCWQG

SEQ ID NO: 1268 - protein, 40 aa, Artificial Sequence
  Description of Artificial Sequence: Synthetic polypeptide
GGWYPCWMAQLGELCDLDGGGGSGGVVCQDWEGVELCWQG

SEQ ID NO: 1269 - protein, 40 aa, Artificial Sequence
  Description of Artificial Sequence: Synthetic polypeptide
GWYPCWMAQLGELCDLDGGGGSGGVVCQDWEGVELCWQGG

SEQ ID NO: 1270 - protein, 60 aa, Artificial Sequence
  Description of Artificial Sequence: Synthetic polypeptide
  MOD_RES (1)..(5): Any amino acid
  SITE (1)..(5): This region may encompass 1-5 residues or be absent in its entirety
  MOD_RES (22)..(41): Any amino acid
  SITE (22)..(41): This region may encompass 1-20 residues
  MOD_RES (56)..(60): Any amino acid
  SITE (56)..(60): This region may encompass 1-5 residues or be absent in its entirety
XXXXXWYPCWMAQLGELCDLDXXXXXXXXXXXXXXXXXXXXVVCQDWEGVELCWQXXXXX

SEQ ID NO: 1271-1439 - skipped (169 entries)

SEQ ID NO: 1440 - protein, 5 aa, Artificial Sequence
  Description of Artificial Sequence: Synthetic peptide
  See specification as filed for detailed description of substitutions and preferred embodiments
EAAAK

SEQ ID NO: 1441 - protein, 40 aa, Artificial Sequence
  Description of Artificial Sequence: Synthetic polypeptide
  SITE (1)..(40): This sequence may encompass 1-20 "Pro Xaa" repeating units
  MOD_RES (2)..(2): Ala, Lys, or Glu
  MOD_RES (4)..(4): Ala, Lys, or Glu
  MOD_RES (6)..(6): Ala, Lys, or Glu
  MOD_RES (8)..(8): Ala, Lys, or Glu
  MOD_RES (10)..(10): Ala, Lys, or Glu
  MOD_RES (12)..(12): Ala, Lys, or Glu
  MOD_RES (14)..(14): Ala, Lys, or Glu
  MOD_RES (16)..(16): Ala, Lys, or Glu
  MOD_RES (18)..(18): Ala, Lys, or Glu
  MOD_RES (20)..(20): Ala, Lys, or Glu
  MOD_RES (22)..(22): Ala, Lys, or Glu
  MOD_RES (24)..(24): Ala, Lys, or Glu
  MOD_RES (26)..(26): Ala, Lys, or Glu
  MOD_RES (28)..(28): Ala, Lys, or Glu
  MOD_RES (30)..(30): Ala, Lys, or Glu
  MOD_RES (32)..(32): Ala, Lys, or Glu
  MOD_RES (34)..(34): Ala, Lys, or Glu
  MOD_RES (36)..(36): Ala, Lys, or Glu
  MOD_RES (38)..(38): Ala, Lys, or Glu
  MOD_RES (40)..(40): Ala, Lys, or Glu
PXPXPXPXPXPXPXPXPXPXPXPXPXPXPXPXPXPXPXPX

SEQ ID NO: 1442 - protein, 30 aa, Artificial Sequence
  Description of Artificial Sequence: Synthetic polypeptide
  SITE (1)..(30): This sequence may encompass 1-15 "Pro Xaa" repeating units
  MOD_RES (2)..(2): Ala, Lys, or Glu
  MOD_RES (4)..(4): Ala, Lys, or Glu
  MOD_RES (6)..(6): Ala, Lys, or Glu
  MOD_RES (8)..(8): Ala, Lys, or Glu
  MOD_RES (10)..(10): Ala, Lys, or Glu
  MOD_RES (12)..(12): Ala, Lys, or Glu
  MOD_RES (14)..(14): Ala, Lys, or Glu
  MOD_RES (16)..(16): Ala, Lys, or Glu
  MOD_RES (18)..(18): Ala, Lys, or Glu
  MOD_RES (20)..(20): Ala, Lys, or Glu
  MOD_RES (22)..(22): Ala, Lys, or Glu
  MOD_RES (24)..(24): Ala, Lys, or Glu
  MOD_RES (26)..(26): Ala, Lys, or Glu
  MOD_RES (28)..(28): Ala, Lys, or Glu
  MOD_RES (30)..(30): Ala, Lys, or Glu
PXPXPXPXPXPXPXPXPXPXPXPXPXPXPX

SEQ ID NO: 1443 - protein, 20 aa, Artificial Sequence
  Description of Artificial Sequence: Synthetic peptide
  SITE (1)..(20): This sequence may encompass 1-10 "Pro Xaa" repeating units
  MOD_RES (2)..(2): Ala, Lys, or Glu
  MOD_RES (4)..(4): Ala, Lys, or Glu
  MOD_RES (6)..(6): Ala, Lys, or Glu
  MOD_RES (8)..(8): Ala, Lys, or Glu
  MOD_RES (10)..(10): Ala, Lys, or Glu
  MOD_RES (12)..(12): Ala, Lys, or Glu
  MOD_RES (14)..(14): Ala, Lys, or Glu
  MOD_RES (16)..(16): Ala, Lys, or Glu
  MOD_RES (18)..(18): Ala, Lys, or Glu
  MOD_RES (20)..(20): Ala, Lys, or Glu
PXPXPXPXPXPXPXPXPXPX

SEQ ID NO: 1444 - protein, 30 aa, Artificial Sequence; identical to SEQ ID NO: 1442
  Description of Artificial Sequence: Synthetic polypeptide
  SITE (1)..(30): This sequence may encompass 5-15 "Pro Xaa" repeating units
  MOD_RES (2)..(2): Ala, Lys, or Glu
  MOD_RES (4)..(4): Ala, Lys, or Glu
  MOD_RES (6)..(6): Ala, Lys, or Glu
  MOD_RES (8)..(8): Ala, Lys, or Glu
  MOD_RES (10)..(10): Ala, Lys, or Glu
  MOD_RES (12)..(12): Ala, Lys, or Glu
  MOD_RES (14)..(14): Ala, Lys, or Glu
  MOD_RES (16)..(16): Ala, Lys, or Glu
  MOD_RES (18)..(18): Ala, Lys, or Glu
  MOD_RES (20)..(20): Ala, Lys, or Glu
  MOD_RES (22)..(22): Ala, Lys, or Glu
  MOD_RES (24)..(24): Ala, Lys, or Glu
  MOD_RES (26)..(26): Ala, Lys, or Glu
  MOD_RES (28)..(28): Ala, Lys, or Glu
  MOD_RES (30)..(30): Ala, Lys, or Glu

SEQ ID NO: 1445 - protein, 20 aa, Artificial Sequence
  Description of Artificial Sequence: Synthetic peptide
  SITE (1)..(20): This sequence may encompass 5-10 "Pro Xaa" repeating units
  MOD_RES (2)..(2): Ala, Lys, or Glu
  MOD_RES (4)..(4): Ala, Lys, or Glu
  MOD_RES (6)..(6): Ala, Lys, or Glu
  MOD_RES (8)..(8): Ala, Lys, or Glu
  MOD_RES (10)..(10): Ala, Lys, or Glu
  MOD_RES (12)..(12): Ala, Lys, or Glu
  MOD_RES (14)..(14): Ala, Lys, or Glu
  MOD_RES (16)..(16): Ala, Lys, or Glu
  MOD_RES (18)..(18): Ala, Lys, or Glu
  MOD_RES (20)..(20): Ala, Lys, or Glu
PXPXPXPXPXPXPXPXPXPX

SEQ ID NO: 1446 - protein, 40 aa, Artificial Sequence
  Description of Artificial Sequence: Synthetic polypeptide
  SITE (1)..(40): This sequence may encompass 1-20 "Xaa Pro" repeating units
  MOD_RES (1)..(1): Ala, Lys, or Glu
  MOD_RES (3)..(3): Ala, Lys, or Glu
  MOD_RES (5)..(5): Ala, Lys, or Glu
  MOD_RES (7)..(7): Ala, Lys, or Glu
  MOD_RES (9)..(9): Ala, Lys, or Glu
  MOD_RES (11)..(11): Ala, Lys, or Glu
  MOD_RES (13)..(13): Ala, Lys, or Glu
  MOD_RES (15)..(15): Ala, Lys, or Glu
  MOD_RES (17)..(17): Ala, Lys, or Glu
  MOD_RES (19)..(19): Ala, Lys, or Glu
  MOD_RES (21)..(21): Ala, Lys, or Glu
  MOD_RES (23)..(23): Ala, Lys, or Glu
  MOD_RES (25)..(25): Ala, Lys, or Glu
  MOD_RES (27)..(27): Ala, Lys, or Glu
  MOD_RES (29)..(29): Ala, Lys, or Glu
  MOD_RES (31)..(31): Ala, Lys, or Glu
  MOD_RES (33)..(33): Ala, Lys, or Glu
  MOD_RES (35)..(35): Ala, Lys, or Glu
  MOD_RES (37)..(37): Ala, Lys, or Glu
  MOD_RES (39)..(39): Ala, Lys, or Glu
XPXPXPXPXPXPXPXPXPXPXPXPXPXPXPXPXPXPXPXP

SEQ ID NO: 1447 - protein, 30 aa, Artificial Sequence
  Description of Artificial Sequence: Synthetic polypeptide
  SITE (1)..(30): This sequence may encompass 1-15 "Xaa Pro" repeating units
  MOD_RES (1)..(1): Ala, Lys, or Glu
  MOD_RES (3)..(3): Ala, Lys, or Glu
  MOD_RES (5)..(5): Ala, Lys, or Glu
  MOD_RES (7)..(7): Ala, Lys, or Glu
  MOD_RES (9)..(9): Ala, Lys, or Glu
  MOD_RES (11)..(11): Ala, Lys, or Glu
  MOD_RES (13)..(13): Ala, Lys, or Glu
  MOD_RES (15)..(15): Ala, Lys, or Glu
  MOD_RES (17)..(17): Ala, Lys, or Glu
  MOD_RES (19)..(19): Ala, Lys, or Glu
  MOD_RES (21)..(21): Ala, Lys, or Glu
  MOD_RES (23)..(23): Ala, Lys, or Glu
  MOD_RES (25)..(25): Ala, Lys, or Glu
  MOD_RES (27)..(27): Ala, Lys, or Glu
  MOD_RES (29)..(29): Ala, Lys, or Glu
XPXPXPXPXPXPXPXPXPXPXPXPXPXPXP

SEQ ID NO: 1448 - protein, 20 aa, Artificial Sequence
  Description of Artificial Sequence: Synthetic peptide
  SITE (1)..(20): This sequence may encompass 1-10 "Xaa Pro" repeating units
  MOD_RES (1)..(1): Ala, Lys, or Glu
  MOD_RES (3)..(3): Ala, Lys, or Glu
  MOD_RES (5)..(5): Ala, Lys, or Glu
  MOD_RES (7)..(7): Ala, Lys, or Glu
  MOD_RES (9)..(9): Ala, Lys, or Glu
  MOD_RES (11)..(11): Ala, Lys, or Glu
  MOD_RES (13)..(13): Ala, Lys, or Glu
  MOD_RES (15)..(15): Ala, Lys, or Glu
  MOD_RES (17)..(17): Ala, Lys, or Glu
  MOD_RES (19)..(19): Ala, Lys, or Glu
XPXPXPXPXPXPXPXPXPXP

SEQ ID NO: 1449 - protein, 30 aa, Artificial Sequence; identical to SEQ ID NO: 1447
  Description of Artificial Sequence: Synthetic polypeptide
  SITE (1)..(30): This sequence may encompass 5-15 "Xaa Pro" repeating units
  MOD_RES (1)..(1): Ala, Lys, or Glu
  MOD_RES (3)..(3): Ala, Lys, or Glu
  MOD_RES (5)..(5): Ala, Lys, or Glu
  MOD_RES (7)..(7): Ala, Lys, or Glu
  MOD_RES (9)..(9): Ala, Lys, or Glu
  MOD_RES (11)..(11): Ala, Lys, or Glu
  MOD_RES (13)..(13): Ala, Lys, or Glu
  MOD_RES (15)..(15): Ala, Lys, or Glu
  MOD_RES (17)..(17): Ala, Lys, or Glu
  MOD_RES (19)..(19): Ala, Lys, or Glu
  MOD_RES (21)..(21): Ala, Lys, or Glu
  MOD_RES (23)..(23): Ala, Lys, or Glu
  MOD_RES (25)..(25): Ala, Lys, or Glu
  MOD_RES (27)..(27): Ala, Lys, or Glu
  MOD_RES (29)..(29): Ala, Lys, or Glu

SEQ ID NO: 1450 - protein, 20 aa, Artificial Sequence
  Description of Artificial Sequence: Synthetic peptide
  SITE (1)..(20): This sequence may encompass 5-10 "Xaa Pro" repeating units
  MOD_RES (1)..(1): Ala, Lys, or Glu
  MOD_RES (3)..(3): Ala, Lys, or Glu
  MOD_RES (5)..(5): Ala, Lys, or Glu
  MOD_RES (7)..(7): Ala, Lys, or Glu
  MOD_RES (9)..(9): Ala, Lys, or Glu
  MOD_RES (11)..(11): Ala, Lys, or Glu
  MOD_RES (13)..(13): Ala, Lys, or Glu
  MOD_RES (15)..(15): Ala, Lys, or Glu
  MOD_RES (17)..(17): Ala, Lys, or Glu
  MOD_RES (19)..(19): Ala, Lys, or Glu
XPXPXPXPXPXPXPXPXPXP

SEQ ID NO: 1451 - skipped

SEQ ID NO: 1452 - protein, 30 aa, Artificial Sequence
  Description of Artificial Sequence: Synthetic polypeptide
  SITE (1)..(30): This sequence may encompass 1-15 "Pro Ala" repeating units
PAPAPAPAPAPAPAPAPAPAPAPAPAPAPA

SEQ ID NO: 1453 - protein, 30 aa, Artificial Sequence; identical to SEQ ID NO: 1452
  Description of Artificial Sequence: Synthetic polypeptide
  SITE (1)..(30): This sequence may encompass 5-15 "Pro Ala" repeating units

SEQ ID NO: 1454 - protein, 20 aa, Artificial Sequence
  Description of Artificial Sequence: Synthetic peptide
  SITE (1)..(20): This sequence may encompass 5-10 "Pro Ala" repeating units
PAPAPAPAPAPAPAPAPAPA

SEQ ID NO: 1455-1459 - skipped (5 entries)

SEQ ID NO: 1460 - protein, 41 aa, Artificial Sequence
  Description of Artificial Sequence: Synthetic polypeptide
  SITE (1)..(40): This region may encompass 1-20 "Pro Ala" repeating units
PAPAPAPAPAPAPAPAPAPAPAPAPAPAPAPAPAPAPAPAG

SEQ ID NO: 1461 - protein, 31 aa, Artificial Sequence
  Description of Artificial Sequence: Synthetic polypeptide
  SITE (1)..(30): This region may encompass 5-15 "Pro Ala" repeating units
PAPAPAPAPAPAPAPAPAPAPAPAPAPAPAG

SEQ ID NO: 1462 - protein, 13 aa, Artificial Sequence
  Description of Artificial Sequence: Synthetic peptide
PAPAPAPAPAPAG

SEQ ID NO: 1463 - protein, 15 aa, Artificial Sequence
  Description of Artificial Sequence: Synthetic peptide
PAPAPAPAPAPAPAG

SEQ ID NO: 1464 - protein, 17 aa, Artificial Sequence
  Description of Artificial Sequence: Synthetic peptide
PAPAPAPAPAPAPAPAG

SEQ ID NO: 1465 - protein, 19 aa, Artificial Sequence
  Description of Artificial Sequence: Synthetic peptide
PAPAPAPAPAPAPAPAPAG

SEQ ID NO: 1466 - protein, 21 aa, Artificial Sequence
  Description of Artificial Sequence: Synthetic peptide
PAPAPAPAPAPAPAPAPAPAG

SEQ ID NO: 1467 - protein, 21 aa, Artificial Sequence
  Description of Artificial Sequence: Synthetic peptide
PAPAPAPAPAPAPAPAPAPAG

SEQ ID NO: 1468-1600 - skipped (133 entries)

SEQ ID NO: 1601 - protein, 16 aa, Artificial Sequence
  Description of Artificial Sequence: Synthetic peptide
GGDCSMWEGVELCWGG

SEQ ID NO: 1602 - protein, 18 aa, Artificial Sequence
  Description of Artificial Sequence: Synthetic peptide
GGVMCERWQGVELCWLGG

SEQ ID NO: 1603 - protein, 20 aa, Artificial Sequence
  Description of Artificial Sequence: Synthetic peptide
GGVGIECEEWAGVELCWLGG

SEQ ID NO: 1604 - protein, 24 aa, Artificial Sequence
  Description of Artificial Sequence: Synthetic peptide
GGTWNMSELECQDWNGVEICWHGG

SEQ ID NO: 1605 - protein, 21 aa, Artificial Sequence
  Description of Artificial Sequence: Synthetic peptide
GGRTEVECEDWEGVELCWLGG

SEQ ID NO: 1606 - protein, 24 aa, Artificial Sequence
  Description of Artificial Sequence: Synthetic peptide
GGRTGVECQDWHGVELCWPVWEGG

SEQ ID NO: 1607 - protein, 18 aa, Artificial Sequence
  Description of Artificial Sequence: Synthetic peptide
  MOD_RES (12)..(12): Abu
GGVVCQDWEGVXLCWQGG

SEQ ID NO: 1608 - protein, 18 aa, Artificial Sequence
  Description of Artificial Sequence: Synthetic peptide
  MOD_RES (12)..(12): Alb
GGVVCQDWEGVXLCWQGG

SEQ ID NO: 1609 - protein, 19 aa, Artificial Sequence
  Description of Artificial Sequence: Synthetic peptide
GGVVCQDWEGVDALCWQGG

SEQ ID NO: 1610 - protein, 18 aa, Artificial Sequence
  Description of Artificial Sequence: Synthetic peptide
GGVVCQDWEGVSLCWQGG

SEQ ID NO: 1611 - protein, 18 aa, Artificial Sequence
  Description of Artificial Sequence: Synthetic peptide
GGVVCQDWEGVGLCWQGG

SEQ ID NO: 1612 - protein, 19 aa, Artificial Sequence
  Description of Artificial Sequence: Synthetic peptide
GGVVCQDWEGVELCWQPPA

SEQ ID NO: 1613 - protein, 20 aa, Artificial Sequence
  Description of Artificial Sequence: Synthetic peptide
GGVVCQDWEGVELCWQGPPA

SEQ ID NO: 1614 - protein, 19 aa, Artificial Sequence
  Description of Artificial Sequence: Synthetic peptide
GGVVCQDWEGVELCWQGGR

SEQ ID NO: 1615-2574 - skipped (960 entries)

SEQ ID NO: 2575 - protein, 16 aa, Artificial Sequence
  Description of Artificial Sequence: Synthetic peptide
  MOD_RES (1)..(1): E, F, G, I, L, R, S, W, or Y
  MOD_RES (2)..(2): F, H, K, L, N, Q, S, T, V, W, or Y
  MOD_RES (3)..(3): E, G, L, P, or S
  MOD_RES (5)..(5): E, F, G, H, Q, R, S, W, or Y
  MOD_RES (6)..(6): E, I, K, L, M, N, R, S, T, or V
  MOD_RES (7)..(7): A, D, G, or Y
  MOD_RES (8)..(8): A, C, D, E, G, H, K, L, N, Q, R, S, or T
  MOD_RES (9)..(9): D, F, L, M, P, R, or V
  MOD_RES (10)..(10): G, R W, or Y
  MOD_RES (11)..(11): A, D, E, Q, W, or Y
  MOD_RES (12)..(12): I, L, Q, V, or Y
  MOD_RES (14)..(14): D, E, G, H, V, or Y
  MOD_RES (15)..(15): D, F, H, I, K, L, M, or V or
  MOD_RES (16)..(16): A, D, E, G, H, K, L, N, Q, V, or W
XXXCXXXXXXXXCXXX

SEQ ID NO: 2576 - protein, 14 aa, Artificial Sequence
  Description of Artificial Sequence: Synthetic peptide
  MOD_RES (1)..(1): F, H, K, L, N, Q, S, T, V, W, or Y
  MOD_RES (2)..(2): E, G, L, P, or S
  MOD_RES (4)..(4): E, F, G, H, Q, R, S, W, or Y
  MOD_RES (5)..(5): E, I, K, L, M, N, R, S, T, or V
  MOD_RES (6)..(6): A, D, G, or Y
  MOD_RES (7)..(7): A, C, D, E, G, H, K, L, N, Q, R, S, or T
  MOD_RES (8)..(8): D, F, L, M, P, R, or V
  MOD_RES (9)..(9): G, R W, or Y
  MOD_RES (10)..(10): A, D, E, Q, W, or Y
  MOD_RES (11)..(11): I, L, Q, V, or Y
  MOD_RES (13)..(13): D, E, G, H, V, or Y
  MOD_RES (14)..(14): D, F, H, I, K, L, M, or V or
XXCXXXXXXXXCXX

SEQ ID NO: 2577 - protein, 12 aa, Artificial Sequence
  Description of Artificial Sequence: Synthetic peptide
  MOD_RES (1)..(1): E, G, L, P, or S
  MOD_RES (3)..(3): E, F, G, H, Q, R, S, W, or Y
  MOD_RES (4)..(4): E, I, K, L, M, N, R, S, T, or V
  MOD_RES (5)..(5): A, D, G, or Y
  MOD_RES (6)..(6): A, C, D, E, G, H, K, L, N, Q, R, S, or T
  MOD_RES (7)..(7): D, F, L, M, P, R, or V
  MOD_RES (8)..(8): G, R W, or Y
  MOD_RES (9)..(9): A, D, E, Q, W, or Y
  MOD_RES (10)..(10): I, L, Q, V, or Y
  MOD_RES (12)..(12): D, E, G, H, V, or Y
XCXXXXXXXXCX

SEQ ID NO: 2578 - protein, 10 aa, Artificial Sequence
  Description of Artificial Sequence: Synthetic peptide
  MOD_RES (2)..(2): E, F, G, H, Q, R, S, W, or Y
  MOD_RES (3)..(3): E, I, K, L, M, N, R, S, T, or V
  MOD_RES (4)..(4): A, D, G, or Y
  MOD_RES (5)..(5): A, C, D, E, G, H, K, L, N, Q, R, S, or T
  MOD_RES (6)..(6): D, F, L, M, P, R, or V
  MOD_RES (7)..(7): G, R W, or Y
  MOD_RES (8)..(8): A, D, E, Q, W, or Y
  MOD_RES (9)..(9): I, L, Q, V, or Y
CXXXXXXXXC

SEQ ID NO: 2579 - protein, 8 aa, Artificial Sequence
  Description of Artificial Sequence: Synthetic peptide
  MOD_RES (1)..(1): E, F, G, H, Q, R, S, W, or Y
  MOD_RES (2)..(2): E, I, K, L, M, N, R, S, T, or V
  MOD_RES (3)..(3): A, D, G, or Y
  MOD_RES (4)..(4): A, C, D, E, G, H, K, L, N, Q, R, S, or T
  MOD_RES (5)..(5): D, F, L, M, P, R, or V
  MOD_RES (6)..(6): G, R W, or Y
  MOD_RES (7)..(7): A, D, E, Q, W, or Y
  MOD_RES (8)..(8): I, L, Q, V, or Y
XXXXXXXX

SEQ ID NO: 2580 - protein, 21 aa, Artificial Sequence
  Description of Artificial Sequence: Synthetic peptide
VRAWYPCWIARLGELCDLEVD

SEQ ID NO: 2581 - protein, 16 aa, Artificial Sequence
  Description of Artificial Sequence: Synthetic peptide
WFPCWMAQLGEVCDLD

SEQ ID NO: 2582 - protein, 16 aa, Artificial Sequence
  Description of Artificial Sequence: Synthetic peptide
WYPCHMAKLRELCDLD

SEQ ID NO: 2583 - protein, 16 aa, Artificial Sequence
  Description of Artificial Sequence: Synthetic peptide
SLPCWMAQLGDLCELH

SEQ ID NO: 2584 - protein, 16 aa, Artificial Sequence
  Description of Artificial Sequence: Synthetic peptide
SNPCWMAQLWELCDLE

SEQ ID NO: 2585 - protein, 16 aa, Artificial Sequence
  Description of Artificial Sequence: Synthetic peptide
YKPCWIAQLGELCELE

SEQ ID NO: 2586 - protein, 16 aa, Artificial Sequence
  Description of Artificial Sequence: Synthetic peptide
WQPCWMAQLGELCDLE

SEQ ID NO: 2587 - protein, 16 aa, Artificial Sequence
  Description of Artificial Sequence: Synthetic peptide
WKPCWLAQLGDLCEME

SEQ ID NO: 2588 - protein, 16 aa, Artificial Sequence
  Description of Artificial Sequence: Synthetic peptide
WLPCWMAKLGDLCELE

SEQ ID NO: 2589 - protein, 16 aa, Artificial Sequence
  Description of Artificial Sequence: Synthetic peptide
WLPCWMAQLGELCVME

SEQ ID NO: 2590 - protein, 16 aa, Artificial Sequence
  Description of Artificial Sequence: Synthetic peptide
LHPCWMAQLGELCDLE

SEQ ID NO: 2591 - protein, 16 aa, Artificial Sequence
  Description of Artificial Sequence: Synthetic peptide
SLPCWMAQLGELCDLV

SEQ ID NO: 2592 - protein, 16 aa, Artificial Sequence
  Description of Artificial Sequence: Synthetic peptide
WKPCWMAGLGELCELD

SEQ ID NO: 2593 - protein, 16 aa, Artificial Sequence
  Description of Artificial Sequence: Synthetic peptide
WWPCSSAELGEICDFD

SEQ ID NO: 2594 - protein, 16 aa, Artificial Sequence
  Description of Artificial Sequence: Synthetic peptide
WQPCWRAKLGELCDLE

SEQ ID NO: 2595 - protein, 16 aa, Artificial Sequence
  Description of Artificial Sequence: Synthetic peptide
WSPCWIATLGELCDLD

SEQ ID NO: 2596 - protein, 16 aa, Artificial Sequence
  Description of Artificial Sequence: Synthetic peptide
WNPCWIAQLGDLCDMV

SEQ ID NO: 2597 - protein, 16 aa, Artificial Sequence
  Description of Artificial Sequence: Synthetic peptide
WLPCWLAHLGDICDLQ

SEQ ID NO: 2598 - protein, 22 aa, Artificial Sequence
  Description of Artificial Sequence: Synthetic peptide
WLSPPSYLPCWMAQLGELCDLV

SEQ ID NO: 2599 - protein, 22 aa, Artificial Sequence
  Description of Artificial Sequence: Synthetic peptide
WDVHAIRNPCWLAKLGDLCDLD

SEQ ID NO: 2600 - protein, 22 aa, Artificial Sequence
  Description of Artificial Sequence: Synthetic peptide
GAGVLHRWPCWMAKLGDLCDLD

SEQ ID NO: 2601 - protein, 22 aa, Artificial Sequence
  Description of Artificial Sequence: Synthetic peptide
DTGRDGWKPCWMALLGELCELE

SEQ ID NO: 2602 - protein, 22 aa, Artificial Sequence
  Description of Artificial Sequence: Synthetic peptide
EQGMLGYFPCWKALLGDVCDLD

SEQ ID NO: 2603 - protein, 22 aa, Artificial Sequence
  Description of Artificial Sequence: Synthetic peptide
WRVTASLQPCWMAQLGELCDLN

SEQ ID NO: 2604 - protein, 22 aa, Artificial Sequence
  Description of Artificial Sequence: Synthetic peptide
GQVVETSLPCWEAQLGELCVLD

SEQ ID NO: 2605 - protein, 22 aa, Artificial Sequence
  Description of Artificial Sequence: Synthetic peptide
TVGQFEWYPCSTAQLGELCDLD

SEQ ID NO: 2606 - protein, 22 aa, Artificial Sequence
  Description of Artificial Sequence: Synthetic peptide
ALVGGTFYPCYVAHLGELCDIE

SEQ ID NO: 2607 - protein, 22 aa, Artificial Sequence
  Description of Artificial Sequence: Synthetic peptide
IDRADGWKPCWIAQVGELCVLE

SEQ ID NO: 2608 - protein, 22 aa, Artificial Sequence
  Description of Artificial Sequence: Synthetic peptide
YRRERVEFPCWLAQLGELCDKE

SEQ ID NO: 2609 - protein, 22 aa, Artificial Sequence
  Description of Artificial Sequence: Synthetic peptide
AVSHGNWLPCYIAQLGELCDLD

SEQ ID NO: 2610 - protein, 22 aa, Artificial Sequence
  Description of Artificial Sequence: Synthetic peptide
IPKGESWFPCWMAAMGELCDLE

SEQ ID NO: 2611 - protein, 22 aa, Artificial Sequence
  Description of Artificial Sequence: Synthetic peptide
WYPCWIAQLGEVCDLEKQTGSV

SEQ ID NO: 2612 - protein, 22 aa, Artificial Sequence
  Description of Artificial Sequence: Synthetic peptide
WYPCWMAHLGDVCDLESFGQTE

SEQ ID NO: 2613 - protein, 22 aa, Artificial Sequence
  Description of Artificial Sequence: Synthetic peptide
YKPCQMAQLGELCDLDVDNKAE

SEQ ID NO: 2614 - protein, 22 aa, Artificial Sequence
  Description of Artificial Sequence: Synthetic peptide
FKPCWIANLGELCDMDDERSSE

SEQ ID NO: 2615 - protein, 22 aa, Artificial Sequence
  Description of Artificial Sequence: Synthetic peptide
WKPCWMARLGELCDIEDTKVNA

SEQ ID NO: 2616 - protein, 22 aa, Artificial Sequence
  Description of Artificial Sequence: Synthetic peptide
SLPCWIARLGELCDLDGYDGEE

SEQ ID NO: 2617 - protein, 22 aa, Artificial Sequence
  Description of Artificial Sequence: Synthetic peptide
FYPCWKARLGELCELEELRGYY

SEQ ID NO: 2618 - protein, 22 aa, Artificial Sequence
  Description of Artificial Sequence: Synthetic peptide
WKPCWIADLGELCDLAPAWHEY

SEQ ID NO: 2619 - protein, 22 aa, Artificial Sequence
  Description of Artificial Sequence: Synthetic peptide
RLPCWRAQLGDLCELDWGLDMG

SEQ ID NO: 2620 - protein, 22 aa, Artificial Sequence
  Description of Artificial Sequence: Synthetic peptide
SKPCWMAQLGELCDLDVWNLQM

SEQ ID NO: 2621 - protein, 22 aa, Artificial Sequence
  Description of Artificial Sequence: Synthetic peptide
GYPCWLAQLGDYCDLDAGAPSW

SEQ ID NO: 2622 - protein, 22 aa, Artificial Sequence
  Description of Artificial Sequence: Synthetic peptide
SWPCWMAQLGDLCDLDGSAGAS

SEQ ID NO: 2623 - protein, 22 aa, Artificial Sequence
  Description of Artificial Sequence: Synthetic peptide
WKPCWLAQLGELCDLERPSTTS

SEQ ID NO: 2624 - protein, 22 aa, Artificial Sequence
  Description of Artificial Sequence: Synthetic peptide
WYSCGKAQLGELCDLDVESQPG

SEQ ID NO: 2625 - protein, 22 aa, Artificial Sequence
  Description of Artificial Sequence: Synthetic peptide
YVPCYMARLGELCELEANRPGQ

SEQ ID NO: 2626 - protein, 22 aa, Artificial Sequence
  Description of Artificial Sequence: Synthetic peptide
SKPCWLAQLGDLCDFDWTAADH

SEQ ID NO: 2627 - protein, 22 aa, Artificial Sequence
  Description of Artificial Sequence: Synthetic peptide
WFPCWMAQLGDLCELEPDSVPA

SEQ ID NO: 2628 - protein, 22 aa, Artificial Sequence
  Description of Artificial Sequence: Synthetic peptide
WTPCWIAHLGDLCDLEPQDDTD

SEQ ID NO: 2629 - protein, 22 aa, Artificial Sequence
  Description of Artificial Sequence: Synthetic peptide
WKPCFIASLGELCDLDQGSVEV

SEQ ID NO: 2630 - protein, 22 aa, Artificial Sequence
  Description of Artificial Sequence: Synthetic peptide
WKPCWMAALGELCDLERSVGKV

SEQ ID NO: 2631 - protein, 22 aa, Artificial Sequence
  Description of Artificial Sequence: Synthetic peptide
WKPCWRAQLGELCDLELGPSER

SEQ ID NO: 2632 - protein, 22 aa, Artificial Sequence
  Description of Artificial Sequence: Synthetic peptide
FFPCWMGQLGDLCDLEVRSMQK

SEQ ID NO: 2633 - protein, 22 aa, Artificial Sequence
  Description of Artificial Sequence: Synthetic peptide
YWPCSMASLGELCDLEWQGRLP

SEQ ID NO: 2634 - protein, 22 aa, Artificial Sequence
  Description of Artificial Sequence: Synthetic peptide
WYPCYMASLGELCDLQSSISPR

SEQ ID NO: 2635 - protein, 22 aa, Artificial Sequence
  Description of Artificial Sequence: Synthetic peptide
WYPCWMAQLGELCDHEWPSYGA

SEQ ID NO: 2636 - protein, 22 aa, Artificial Sequence
  Description of Artificial Sequence: Synthetic peptide
MGSWLPCWMAQLGDLCDVEGGM

SEQ ID NO: 2637 - protein, 22 aa, Artificial Sequence
  Description of Artificial Sequence: Synthetic peptide
QKGFLPCWRAQLGQLCDMESQY

SEQ ID NO: 2638 - protein, 22 aa, Artificial Sequence
  Description of Artificial Sequence: Synthetic peptide
GSGWQPCWMADLGELCDLDNEK

SEQ ID NO: 2639 - protein, 22 aa, Artificial Sequence
  Description of Artificial Sequence: Synthetic peptide
WRRWYPCWMAQLGELCDLDQWT

SEQ ID NO: 2640 - protein, 22 aa, Artificial Sequence
  Description of Artificial Sequence: Synthetic peptide
RRSWYPCRIAQLGELCDLDPRV

SEQ ID NO: 2641 - protein, 22 aa, Artificial Sequence
  Description of Artificial Sequence: Synthetic peptide
AYRIYPCWKAQLGELCDLDNAD

SEQ ID NO: 2642 - protein, 22 aa, Artificial Sequence
  Description of Artificial Sequence: Synthetic peptide
QRNSFPCWLAQLGDLCDLGDWA

SEQ ID NO: 2643 - protein, 22 aa, Artificial Sequence
  Description of Artificial Sequence: Synthetic peptide
QPAWLPCWLAQLGELCDLGTGA

SEQ ID NO: 2644 - protein, 22 aa, Artificial Sequence
  Description of Artificial Sequence: Synthetic peptide
SRFWQPCWMAQLGELCHLDPQM

SEQ ID NO: 2645 - protein, 22 aa, Artificial Sequence
  Description of Artificial Sequence: Synthetic peptide
YLNFNPCWTAQLGELCDLASGE

SEQ ID NO: 2646 - protein, 22 aa, Artificial Sequence
  Description of Artificial Sequence: Synthetic peptide
STGWYPCWIAEFGELCDLVKPH

SEQ ID NO: 2647 - protein, 22 aa, Artificial Sequence
  Description of Artificial Sequence: Synthetic peptide
AHWSQPCWTAQLGELCDLDMGD

SEQ ID NO: 2648 - protein, 22 aa, Artificial Sequence
  Description of Artificial Sequence: Synthetic peptide
HPVRYPCWVAQLGELCDLENGN

SEQ ID NO: 2649 - protein, 22 aa, Artificial Sequence
  Description of Artificial Sequence: Synthetic peptide
QTGSYPCWIAHLGELCDLEGSA

SEQ ID NO: 2650 - protein, 21 aa, Artificial Sequence
  Description of Artificial Sequence: Synthetic peptide
TGWWYPCWMAQLGELCDLQQT

SEQ ID NO: 2651 - protein, 19 aa, Artificial Sequence
  Description of Artificial Sequence: Synthetic peptide
DLWQPCWMARLGELCDLKG

SEQ ID NO: 2652 - protein, 20 aa, Artificial Sequence
  Description of Artificial Sequence: Synthetic peptide
MGTGWQNYCRYAQLGELCLL

SEQ ID NO: 2653 - protein, 16 aa, Artificial Sequence
  Description of Artificial Sequence: Synthetic peptide
WYPCGVAQPGDLCDLE

SEQ ID NO: 2654 - protein, 22 aa, Artificial Sequence
  Description of Artificial Sequence: Synthetic peptide
MLGEWLCEMDQLGYLCYLDHGD

SEQ ID NO: 2655 - protein, 20 aa, Artificial Sequence
  Description of Artificial Sequence: Synthetic peptide
WDGWECGMDHDGWVCEFWGE

SEQ ID NO: 2656-2660 - skipped (5 entries)

SEQ ID NO: 2661 - protein, 19 aa, Artificial Sequence
  Description of Artificial Sequence: Synthetic peptide
  MOD_RES (1)..(1): A, D, E, F, G, H, I, K, L, M, N, P, Q, R, S, T, V, W, or Y
  MOD_RES (2)..(2): C, D, F, G, I, L, M, R, S, V, W, or Y
  MOD_RES (3)..(3): A, D, F, H, K, L, N, P, Q, R, S, T, V, W, or Y
  MOD_RES (4)..(4): A, D, F, L, N, P, Q, S, T, or W
  MOD_RES (6)..(6): D, E, F, G, L, M, Q, R, S, W, or Y
  MOD_RES (7)..(7): A, F, I, K, L, M, N, Q, R, S, V, W, or Y
  MOD_RES (8)..(8): A, D, E, I, S, T, V, or W
  MOD_RES (9)..(9): A, E, F, G, H, K, L, N, P, Q, R, S, V, W, or Y
  MOD_RES (10)..(10): A, E, I, L, M, P, Q V, or W
  MOD_RES (11)..(11): F, G, or V
  MOD_RES (12)..(12): D, E, N, P, Q, S, V, W, or Y
  MOD_RES (13)..(13): D, F, H, I, L, M, Q, S, T, V, or W
  MOD_RES (15)..(15): A, D, E, L, N, Q, S, T, or V
  MOD_RES (16)..(16): A, E, F, I, K, L, M, Q, R S, T V, or W
  MOD_RES (17)..(17): A, D, E, F, G, I, K, L, N, P, Q, R, T, V, W, or Y
  MOD_RES (18)..(18): A, C, D, E, F, G, H, I, L, M, N, P, Q, R, S, T, V, W, or Y
  MOD_RES (19)..(19): A, D, E, F, G, H, I, K, L, M N, P, Q, R, S, T, V, W, or Y
XXXXCXXXXXXXXCXXXXX

SEQ ID NO: 2662 - protein, 16 aa, Artificial Sequence
  Description of Artificial Sequence: Synthetic peptide
  MOD_RES (1)..(1): C, D, F, G, I, L, M, R, S, V, W, or Y
  MOD_RES (2)..(2): A, D, F, H, K, L, N, P, Q, R, S, T, V, W, or Y
  MOD_RES (3)..(3): A, D, F, L, N, P, Q, S, T, or W
  MOD_RES (5)..(5): D, E, F, G, L, M, Q, R, S, W, or Y
  MOD_RES (6)..(6): A, F, I, K, L, M, N, Q, R, S, V, W, or Y
  MOD_RES (7)..(7): A, D, E, I, S, T, V, or W
  MOD_RES (8)..(8): A, E, F, G, H, K, L, N, P, Q, R, S, V, W, or Y
  MOD_RES (9)..(9): A, E, I, L, M, P, Q V, or W
  MOD_RES (10)..(10): F, G, or V
  MOD_RES (11)..(11): D, E, N, P, Q, S, V, W, or Y
  MOD_RES (12)..(12): D, F, H, I, L, M, Q, S, T, V, or W
  MOD_RES (14)..(14): A, D, E, L, N, Q, S, T, or V
  MOD_RES (15)..(15): A, E, F, I, K, L, M, Q, R S, T V, or W
  MOD_RES (16)..(16): A, D, E, F, G, I, K, L, N, P, Q, R, T, V, W, or Y
XXXCXXXXXXXXCXXX

SEQ ID NO: 2663 - protein, 14 aa, Artificial Sequence
  Description of Artificial Sequence: Synthetic peptide
  MOD_RES (1)..(1): A, D, F, H, K, L, N, P, Q, R, S, T, V, W, or Y
  MOD_RES (2)..(2): A, D, F, L, N, P, Q, S, T, or W
  MOD_RES (4)..(4): D, E, F, G, L, M, Q, R, S, W, or Y
  MOD_RES (5)..(5): A, F, I, K, L, M, N, Q, R, S, V, W, or Y
  MOD_RES (6)..(6): A, D, E, I, S, T, V, or W
  MOD_RES (7)..(7): A, E, F, G, H, K, L, N, P, Q, R, S, V, W, or Y
  MOD_RES (8)..(8): A, E, I, L, M, P, Q V, or W
  MOD_RES (9)..(9): F, G, or V
  MOD_RES (10)..(10): D, E, N, P, Q, S, V, W, or Y
  MOD_RES (11)..(11): D, F, H, I, L, M, Q, S, T, V, or W
  MOD_RES (13)..(13): A, D, E, L, N, Q, S, T, or V
  MOD_RES (14)..(14): A, E, F, I, K, L, M, Q, R S, T V, or W
XXCXXXXXXXXCXX

SEQ ID NO: 2664 - protein, 12 aa, Artificial Sequence
  Description of Artificial Sequence: Synthetic peptide
  MOD_RES (1)..(1): A, D, F, L, N, P, Q, S, T, or W
  MOD_RES (3)..(3): D, E, F, G, L, M, Q, R, S, W, or Y
  MOD_RES (4)..(4): A, F, I, K, L, M, N, Q, R, S, V, W, or Y
  MOD_RES (5)..(5): A, D, E, I, S, T, V, or W
  MOD_RES (6)..(6): A, E, F, G, H, K, L, N, P, Q, R, S, V, W, or Y
  MOD_RES (7)..(7): A, E, I, L, M, P, Q V, or W
  MOD_RES (8)..(8): F, G, or V
  MOD_RES (9)..(9): D, E, N, P, Q, S, V, W, or Y
  MOD_RES (10)..(10): D, F, H, I, L, M, Q, S, T, V, or W
  MOD_RES (12)..(12): A, D, E, L, N, Q, S, T, or V
XCXXXXXXXXCX

SEQ ID NO: 2665 - protein, 10 aa, Artificial Sequence
  Description of Artificial Sequence: Synthetic peptide
  MOD_RES (2)..(2): D, E, F, G, L, M, Q, R, S, W, or Y
  MOD_RES (3)..(3): A, F, I, K, L, M, N, Q, R, S, V, W, or Y
  MOD_RES (4)..(4): A, D, E, I, S, T, V, or W
  MOD_RES (5)..(5): A, E, F, G, H, K, L, N, P, Q, R, S, V, W, or Y
  MOD_RES (6)..(6): A, E, I, L, M, P, Q V, or W
  MOD_RES (7)..(7): F, G, or V
  MOD_RES (8)..(8): D, E, N, P, Q, S, V, W, or Y
  MOD_RES (9)..(9): D, F, H, I, L, M, Q, S, T, V, or W
CXXXXXXXXC

SEQ ID NO: 2666 - protein, 8 aa, Artificial Sequence
  Description of Artificial Sequence: Synthetic peptide
  MOD_RES (1)..(1): D, E, F, G, L, M, Q, R, S, W, or Y
  MOD_RES (2)..(2): A, F, I, K, L, M, N, Q, R, S, V, W, or Y
  MOD_RES (3)..(3): A, D, E, I, S, T, V, or W
  MOD_RES (4)..(4): A, E, F, G, H, K, L, N, P, Q, R, S, V, W, or Y
  MOD_RES (5)..(5): A, E, I, L, M, P, Q V, or W
  MOD_RES (6)..(6): F, G, or V
  MOD_RES (7)..(7): D, E, N, P, Q, S, V, W, or Y
  MOD_RES (8)..(8): D, F, H, I, L, M, Q, S, T, V, or W
XXXXXXXX

SEQ ID NO: 2667 - protein, 22 aa, Artificial Sequence
  Description of Artificial Sequence: Synthetic peptide
WYPCWIAQLGELCDLDAKGQRR

SEQ ID NO: 2668 - protein, 22 aa, Artificial Sequence
  Description of Artificial Sequence: Synthetic peptide
TNNFYPCWLAKLGDLCDFDDLN

SEQ ID NO: 2669 - protein, 22 aa, Artificial Sequence
  Description of Artificial Sequence: Synthetic peptide
WYPCWIARVGELCDLEEGPVNR

SEQ ID NO: 2670 - protein, 21 aa, Artificial Sequence
  Description of Artificial Sequence: Synthetic peptide
AVEFYPCWLARIGELCDLVEP

SEQ ID NO: 2671 - protein, 16 aa, Artificial Sequence
  Description of Artificial Sequence: Synthetic peptide
WYPCWIAHLGELCDLE

SEQ ID NO: 2672 - protein, 16 aa, Artificial Sequence
  Description of Artificial Sequence: Synthetic peptide
WYPCWIARVGELCDME

SEQ ID NO: 2673 - protein, 21 aa, Artificial Sequence
  Description of Artificial Sequence: Synthetic peptide
RREWYPCWIAQVGELCDLPLI

SEQ ID NO: 2674 - protein, 22 aa, Artificial Sequence
  Description of Artificial Sequence: Synthetic peptide
RWPWYPCEIARIGELCDLEQAN

SEQ ID NO: 2675 - protein, 22 aa, Artificial Sequence
  Description of Artificial Sequence: Synthetic peptide
FGAFYPCWKAQLGELCDLEPVT

SEQ ID NO: 2676 - protein, 22 aa, Artificial Sequence
  Description of Artificial Sequence: Synthetic peptide
HGRWFPCWMAQVGDLCDLEHSN

SEQ ID NO: 2677 - protein, 22 aa, Artificial Sequence
  Description of Artificial Sequence: Synthetic peptide
WYPCWLAKLGELCDLDRAEALP

SEQ ID NO: 2678 - protein, 20 aa, Artificial Sequence
  Description of Artificial Sequence: Synthetic peptide
VWFPCWFAQLGDLCDLDQDP

SEQ ID NO: 2679 - protein, 22 aa, Artificial Sequence
  Description of Artificial Sequence: Synthetic peptide
ETLGSVWYPCWIASIGELCDLD

SEQ ID NO: 2680 - protein, 22 aa, Artificial Sequence
  Description of Artificial Sequence: Synthetic peptide
WYSCWIAQLGELCDLDDMGDRV

SEQ ID NO: 2681 - protein, 16 aa, Artificial Sequence
  Description of Artificial Sequence: Synthetic peptide
WFPCWLAQLGELCDKE

SEQ ID NO: 2682 - protein, 16 aa, Artificial Sequence
  Description of Artificial Sequence: Synthetic peptide
WYPCWIAQLGELCDLV

SEQ ID NO: 2683 - protein, 22 aa, Artificial Sequence
  Description of Artificial Sequence: Synthetic peptide
SHLWFPCWMAQLGELCDLEGGP

SEQ ID NO: 2684 - protein, 21 aa, Artificial Sequence
  Description of Artificial Sequence: Synthetic peptide
RRWLPCWMAHVGELCDLELGN

SEQ ID NO: 2685 - protein, 21 aa, Artificial Sequence
  Description of Artificial Sequence: Synthetic peptide
YWCWFARVGELCDLDDGGVPS

SEQ ID NO: 2686 - protein, 16 aa, Artificial Sequence
  Description of Artificial Sequence: Synthetic peptide
WYSCWIAQIGELCDLE

SEQ ID NO: 2687 - protein, 22 aa, Artificial Sequence
  Description of Artificial Sequence: Synthetic peptide
MNPVGTFYPCWIAKLGELCDLQ

SEQ ID NO: 2688 - protein, 22 aa, Artificial Sequence
  Description of Artificial Sequence: Synthetic peptide
HGGVIGWYPCWMAKVGELCDLD

SEQ ID NO: 2689 - protein, 22 aa, Artificial Sequence
  Description of Artificial Sequence: Synthetic peptide
WYPCSIALLGELCDLESVHEKS

SEQ ID NO: 2690 - protein, 22 aa, Artificial Sequence
  Description of Artificial Sequence: Synthetic peptide
EQRNRQWWPCWLARLGDLCDLD

SEQ ID NO: 2691 - protein, 16 aa, Artificial Sequence
  Description of Artificial Sequence: Synthetic peptide
WYPCWLAQLGELCDLD

SEQ ID NO: 2692 - protein, 16 aa, Artificial Sequence
  Description of Artificial Sequence: Synthetic peptide
WLPCWMAHLGDLCDLE

SEQ ID NO: 2693 - protein, 22 aa, Artificial Sequence
  Description of Artificial Sequence: Synthetic peptide
RPSWAPCWLAQVGELCDLDHPE

SEQ ID NO: 2694 - protein, 22 aa, Artificial Sequence
  Description of Artificial Sequence: Synthetic peptide
ESKEPAFWPCWMAQLGDLCDLE

SEQ ID NO: 2695 - protein, 22 aa, Artificial Sequence
  Description of Artificial Sequence: Synthetic peptide
RSLRESWFPCWMAKLGDLCDLE

SEQ ID NO: 2696 - protein, 16 aa, Artificial Sequence
  Description of Artificial Sequence: Synthetic peptide
WHPCWLARVGDLCDLD

SEQ ID NO: 2697 - protein, 22 aa, Artificial Sequence
  Description of Artificial Sequence: Synthetic peptide
SRSAGEYYPCWLAQLGELCDLA

SEQ ID NO: 2698 - protein, 22 aa, Artificial Sequence
  Description of Artificial Sequence: Synthetic peptide
RQVPKQWYPCWMAALGELCDLE

SEQ ID NO: 2699 - protein, 16 aa, Artificial Sequence
  Description of Artificial Sequence: Synthetic peptide
WYPCWLAHLGELCDLE

SEQ ID NO: 2700 - protein, 21 aa, Artificial Sequence
  Description of Artificial Sequence: Synthetic peptide
QVMRLWYPCWMAQLGELCDLE

SEQ ID NO: 2701 - protein, 22 aa, Artificial Sequence
  Description of Artificial Sequence: Synthetic peptide
WYPCWMAQLGELCDLDEAPVQP

SEQ ID NO: 2702 - protein, 22 aa, Artificial Sequence
  Description of Artificial Sequence: Synthetic peptide
RDIWWPCWVAQLGELCDLDDPQ

SEQ ID NO: 2703 - protein, 22 aa, Artificial Sequence
  Description of Artificial Sequence: Synthetic peptide
SATWYPCFLANLGELCDLEQEN

SEQ ID NO: 2704 - protein, 22 aa, Artificial Sequence
  Description of Artificial Sequence: Synthetic peptide
YAEWYPCWMARVGEVCDLEVTP

SEQ ID NO: 2705 - protein, 22 aa, Artificial Sequence
  Description of Artificial Sequence: Synthetic peptide
RSGDKAFFPCWLAQLGDLCDLD

SEQ ID NO: 2706 - protein, 16 aa, Artificial Sequence
  Description of Artificial Sequence: Synthetic peptide
WYPCWMAQLGELCDMD

SEQ ID NO: 2707 - protein, 21 aa, Artificial Sequence
  Description of Artificial Sequence: Synthetic peptide
RVSYPCWLARLGELCDMDLEE

SEQ ID NO: 2708 - protein, 22 aa, Artificial Sequence
  Description of Artificial Sequence: Synthetic peptide
TESWYPCWLANLGDLCDLEWSA

SEQ ID NO: 2709 - protein, 16 aa, Artificial Sequence
  Description of Artificial Sequence: Synthetic peptide
WLPCWMADVGDLCDLD

SEQ ID NO: 2710 - protein, 16 aa, Artificial Sequence
  Description of Artificial Sequence: Synthetic peptide
WHPCWMARLGELCDLD

SEQ ID NO: 2711 - protein, 22 aa, Artificial Sequence
  Description of Artificial Sequence: Synthetic peptide
QGTKWHWNPCWMAQLGELCDLD

SEQ ID NO: 2712 - protein, 22 aa, Artificial Sequence
  Description of Artificial Sequence: Synthetic peptide
KNGPKSWYPCWMAQVGDLCDLD

SEQ ID NO: 2713 - protein, 22 aa, Artificial Sequence
  Description of Artificial Sequence: Synthetic peptide
SGTGPAWYPCFLASLGQLCDLE

SEQ ID NO: 2714 - protein, 16 aa, Artificial Sequence
  Description of Artificial Sequence: Synthetic peptide
WYPCWMARMGELCDLE

SEQ ID NO: 2715 - protein, 16 aa, Artificial Sequence
  Description of Artificial Sequence: Synthetic peptide
WLPCWRAQLGQLCDLD

SEQ ID NO: 2716 - protein, 16 aa, Artificial Sequence
  Description of Artificial Sequence: Synthetic peptide
LFPCWLAQLGELCDLE

SEQ ID NO: 2717 - protein, 16 aa, Artificial Sequence
  Description of Artificial Sequence: Synthetic peptide
RYPCWIAQLGELCDLD

SEQ ID NO: 2718 - protein, 16 aa, Artificial Sequence
  Description of Artificial Sequence: Synthetic peptide
WHPCWIAHLGELCDLE

SEQ ID NO: 2719 - protein, 16 aa, Artificial Sequence
  Description of Artificial Sequence: Synthetic peptide
MYPCWIAHLGELCDLD

SEQ ID NO: 2720 - protein, 16 aa, Artificial Sequence
  Description of Artificial Sequence: Synthetic peptide
WYPCSIASLGELCDLE

SEQ ID NO: 2721 - protein, 16 aa, Artificial Sequence
  Description of Artificial Sequence: Synthetic peptide
WLPCYMAQLGDLCDLE

SEQ ID NO: 2722 - protein, 16 aa, Artificial Sequence
  Description of Artificial Sequence: Synthetic peptide
WHPCWMAQVGEVCDLD

SEQ ID NO: 2723 - protein, 16 aa, Artificial Sequence
  Description of Artificial Sequence: Synthetic peptide
WYPCWLASLGEVCDLE

SEQ ID NO: 2724 - protein, 16 aa, Artificial Sequence
  Description of Artificial Sequence: Synthetic peptide
WWPCSIARLGQLCDLD

SEQ ID NO: 2725 - protein, 16 aa, Artificial Sequence
  Description of Artificial Sequence: Synthetic peptide
WYPCWLAHLGELCDLA

SEQ ID NO: 2726 - protein, 16 aa, Artificial Sequence
  Description of Artificial Sequence: Synthetic peptide
WYPCWLAQLGELCDAE

SEQ ID NO: 2727 - protein, 16 aa, Artificial Sequence
  Description of Artificial Sequence: Synthetic peptide
WKPCWMALLGELCDLE

SEQ ID NO: 2728 - protein, 16 aa, Artificial Sequence
  Description of Artificial Sequence: Synthetic peptide
RYPCWRAKLGELCDLD

SEQ ID NO: 2729 - protein, 22 aa, Artificial Sequence
  Description of Artificial Sequence: Synthetic peptide
EEQSRGFLPCWMALLGELCDLD

SEQ ID NO: 2730 - protein, 22 aa, Artificial Sequence
  Description of Artificial Sequence: Synthetic peptide
LGSKRQWYPCWVAHLGELCDLE

SEQ ID NO: 2731 - protein, 22 aa, Artificial Sequence
  Description of Artificial Sequence: Synthetic peptide
ESEGRGWYPCWNALLGELCDLE

SEQ ID NO: 2732 - protein, 22 aa, Artificial Sequence
  Description of Artificial Sequence: Synthetic peptide
RWTQAQWYPCWLAQLGELCDLE

SEQ ID NO: 2733 - protein, 21 aa, Artificial Sequence
  Description of Artificial Sequence: Synthetic peptide
LHAGRWNPCWLAQLGELCDLE

SEQ ID NO: 2734 - protein, 21 aa, Artificial Sequence
  Description of Artificial Sequence: Synthetic peptide
LSSKGWYPCWKARLGDLCDLE

SEQ ID NO: 2735 - protein, 22 aa, Artificial Sequence
  Description of Artificial Sequence: Synthetic peptide
DMFTHRWYPCSMAKLGELCDLE

SEQ ID NO: 2736 - protein, 22 aa, Artificial Sequence
  Description of Artificial Sequence: Synthetic peptide
MTDRAFWNPCWVARLGELCDLD

SEQ ID NO: 2737 - protein, 22 aa, Artificial Sequence
  Description of Artificial Sequence: Synthetic peptide
NVTYTQWFPCWLARLGELCDLV

SEQ ID NO: 2738 - protein, 21 aa, Artificial Sequence
  Description of Artificial Sequence: Synthetic peptide
VRTRIWYPCWSAQLGELCDLD

SEQ ID NO: 2739 - protein, 21 aa, Artificial Sequence
  Description of Artificial Sequence: Synthetic peptide
AMARRYLPCWIAKLGELCELD

SEQ ID NO: 2740 - protein, 22 aa, Artificial Sequence
  Description of Artificial Sequence: Synthetic peptide
ARGEYRWFPCWMARLGELCDLE

SEQ ID NO: 2741 - protein, 22 aa, Artificial Sequence
  Description of Artificial Sequence: Synthetic peptide
YLERSRWYPCFIAQLGELCDLE

SEQ ID NO: 2742 - protein, 22 aa, Artificial Sequence
  Description of Artificial Sequence: Synthetic peptide
FRVSRDWFPCWMAQLGEVCDLE

SEQ ID NO: 2743 - protein, 22 aa, Artificial Sequence
  Description of Artificial Sequence: Synthetic peptide
IERAWEWRPCWLASVGELCDLE

SEQ ID NO: 2744 - protein, 21 aa, Artificial Sequence
  Description of Artificial Sequence: Synthetic peptide
VASERFYPCWIARLGELCDVE

SEQ ID NO: 2745 - protein, 22 aa, Artificial Sequence
  Description of Artificial Sequence: Synthetic peptide
WYPCWIAKLGEVCDLDQGTTRQ

SEQ ID NO: 2746 - protein, 22 aa, Artificial Sequence
  Description of Artificial Sequence: Synthetic peptide
WYPCWLAHLGELCDLDWKGRND

SEQ ID NO: 2747 - protein, 22 aa, Artificial Sequence
  Description of Artificial Sequence: Synthetic peptide
WYPCWRAQLGELCDLVDLGSHL

SEQ ID NO: 2748 - protein, 22 aa, Artificial Sequence
  Description of Artificial Sequence: Synthetic peptide
WSPCWMASLGDLCDLEETRQTE

SEQ ID NO: 2749 - protein, 22 aa, Artificial Sequence
  Description of Artificial Sequence: Synthetic peptide
WTPCWIAQLGELCDLEGRHGTV

SEQ ID NO: 2750 - protein, 21 aa, Artificial Sequence
  Description of Artificial Sequence: Synthetic peptide
LPCWIAQLGDLCDLEPEPSPE

SEQ ID NO: 2751 - protein, 22 aa, Artificial Sequence
  Description of Artificial Sequence: Synthetic peptide
FYPCWAAHLGDLCDLEYQEAGP

SEQ ID NO: 2752 - protein, 22 aa, Artificial Sequence
  Description of Artificial Sequence: Synthetic peptide
WLPCWLAPLGDLCDMDMSAVMN

SEQ ID NO: 2753 - protein, 22 aa, Artificial Sequence
  Description of Artificial Sequence: Synthetic peptide
WRPCWMAHLGDLCDLEMANENP

SEQ ID NO: 2754 - protein, 22 aa, Artificial Sequence
  Description of Artificial Sequence: Synthetic peptide
WYPCWLAQLGEVCDLDDGGGVF

SEQ ID NO: 2755 - protein, 22 aa, Artificial Sequence
  Description of Artificial Sequence: Synthetic peptide
WWPCWLAQLGELCDLEVNGSLI

SEQ ID NO: 2756 - protein, 22 aa, Artificial Sequence
  Description of Artificial Sequence: Synthetic peptide
TEMWYPCWMAYQGELCDLDMTY

SEQ ID NO: 2757 - protein, 22 aa, Artificial Sequence
  Description of Artificial Sequence: Synthetic peptide
ARTWWPCWRAKLGELCDLVVPE

SEQ ID NO: 2758 - protein, 22 aa, Artificial Sequence
  Description of Artificial Sequence: Synthetic peptide
HQGFYSCRLARLGELCDLDTGW

SEQ ID NO: 2759 - protein, 22 aa, Artificial Sequence
  Description of Artificial Sequence: Synthetic peptide
VDEFYPCSMAGLGELCDLERQN

SEQ ID NO: 2760 - protein, 22 aa, Artificial Sequence
  Description of Artificial Sequence: Synthetic peptide
AWDWYPCSVAALGEICDLDIQD

SEQ ID NO: 2761 - protein, 22 aa, Artificial Sequence
  Description of Artificial Sequence: Synthetic peptide
RPPWYPCWMARLGEVCDMDIML

SEQ ID NO: 2762 - protein, 22 aa, Artificial Sequence
  Description of Artificial Sequence: Synthetic peptide
SQRWYPCWVAHLGELCDLEGVV

SEQ ID NO: 2763 - protein, 22 aa, Artificial Sequence
  Description of Artificial Sequence: Synthetic peptide
KGSWQPCWFAKLGELCDLHPTS

SEQ ID NO: 2764 - protein, 22 aa, Artificial Sequence
  Description of Artificial Sequence: Synthetic peptide
QTWYLPCWMAKLGELCDLGERD

SEQ ID NO: 2765 - protein, 22 aa, Artificial Sequence
  Description of Artificial Sequence: Synthetic peptide
EPRWYPCWMAQMGELCDMEMSD

SEQ ID NO: 2766 - protein, 22 aa, Artificial Sequence
  Description of Artificial Sequence: Synthetic peptide
WGGRYWCWMAKLGDLCDLEDEW

SEQ ID NO: 2767 - protein, 22 aa, Artificial Sequence
  Description of Artificial Sequence: Synthetic peptide
WWPCWIAQVGELCDLDGPGRPT

SEQ ID NO: 2768 - protein, 19 aa, Artificial Sequence
  Description of Artificial Sequence: Synthetic peptide
RLVYDCLFAQVGDLCEVIS

SEQ ID NO: 2769 - protein, 20 aa, Artificial Sequence
  Description of Artificial Sequence: Synthetic peptide
WRILWMQQCWRSHVVNQCAL

SEQ ID NO: 2770 - protein, 22 aa, Artificial Sequence
  Description of Artificial Sequence: Synthetic peptide
WYPCWIAQVGELCDLDEVSHGR

SEQ ID NO: 2771 - protein, 22 aa, Artificial Sequence
  Description of Artificial Sequence: Synthetic peptide
TGEWWPCWVAEVGELCDLERGP

SEQ ID NO: 2772 - protein, 20 aa, Artificial Sequence
  Description of Artificial Sequence: Synthetic peptide
ARTQGWYDCLFAQVGELCDL

SEQ ID NO: 2773 - protein, 22 aa, Artificial Sequence
  Description of Artificial Sequence: Synthetic peptide
FHPCWRALLGELCDLETALGPS

SEQ ID NO: 2774 - protein, 20 aa, Artificial Sequence
  Description of Artificial Sequence: Synthetic peptide
LQIRKLWACRIDLVGPFCLL

SEQ ID NO: 2775 - protein, 20 aa, Artificial Sequence
  Description of Artificial Sequence: Synthetic peptide
AEYSGRYDCYIAKVGELCDI

SEQ ID NO: 2776 - protein, 20 aa, Artificial Sequence
  Description of Artificial Sequence: Synthetic peptide
SWRFLWQDCGRAHVGELCDL

SEQ ID NO: 2777 - protein, 22 aa, Artificial Sequence
  Description of Artificial Sequence: Synthetic peptide
NRWWHPCWMARVGELCDLEPDA

SEQ ID NO: 2778 - protein, 22 aa, Artificial Sequence
  Description of Artificial Sequence: Synthetic peptide
WWPCWVAKLGELCDLEGDASRV

SEQ ID NO: 2779 - protein, 22 aa, Artificial Sequence
  Description of Artificial Sequence: Synthetic peptide
WYPCEFAQLGELCDLLPFPYPA

SEQ ID NO: 2780 - protein, 20 aa, Artificial Sequence
  Description of Artificial Sequence: Synthetic peptide
SYMHDCFMAQVGDLCDRFIS

SEQ ID NO: 2781 - protein, 22 aa, Artificial Sequence
  Description of Artificial Sequence: Synthetic peptide
WWPCWIAQVGELCDLEEESRES

SEQ ID NO: 2782 - protein, 22 aa, Artificial Sequence
  Description of Artificial Sequence: Synthetic peptide
KWAWNPCYIARLGELCDLVEPE

SEQ ID NO: 2783 - protein, 22 aa, Artificial Sequence
  Description of Artificial Sequence: Synthetic peptide
WWPCWIADLGELCDLEGPPRGR

SEQ ID NO: 2784 - protein, 20 aa, Artificial Sequence
  Description of Artificial Sequence: Synthetic peptide
PTLITWYDCLFAEVGELCDM

SEQ ID NO: 2785 - protein, 20 aa, Artificial Sequence
  Description of Artificial Sequence: Synthetic peptide
EISNWFLDCMFADVGDLCDL

SEQ ID NO: 2786 - protein, 22 aa, Artificial Sequence
  Description of Artificial Sequence: Synthetic peptide
AQVWYPCWLAKVGELCDLDQWN

SEQ ID NO: 2787 - protein, 22 aa, Artificial Sequence
  Description of Artificial Sequence: Synthetic peptide
FGGKMDWYPCWIANLGELCDLK

SEQ ID NO: 2788 - protein, 22 aa, Artificial Sequence
  Description of Artificial Sequence: Synthetic peptide
WFPCWMAKVGDLCDVDEHQDPS

SEQ ID NO: 2789 - protein, 22 aa, Artificial Sequence
  Description of Artificial Sequence: Synthetic peptide
MGDSSSWFPCWMAQLGELCDME

SEQ ID NO: 2790 - protein, 22 aa, Artificial Sequence
  Description of Artificial Sequence: Synthetic peptide
MFRYYPCWIASIGELCDLEWGV

SEQ ID NO: 2791 - protein, 22 aa, Artificial Sequence
  Description of Artificial Sequence: Synthetic peptide
ERRWYPCWLASVGELCDLDMGD

SEQ ID NO: 2792 - protein, 16 aa, Artificial Sequence
  Description of Artificial Sequence: Synthetic peptide
WYPCWVAQLGELCDLE

SEQ ID NO: 2793 - protein, 22 aa, Artificial Sequence
  Description of Artificial Sequence: Synthetic peptide
RWDYWPCYIAQVGELCDLEVYE

SEQ ID NO: 2794 - protein, 22 aa, Artificial Sequence
  Description of Artificial Sequence: Synthetic peptide
SLAHRSWYPCWLAQVGELCDLD

SEQ ID NO: 2795 - protein, 22 aa, Artificial Sequence
  Description of Artificial Sequence: Synthetic peptide
QNASKGWYPCWIAHVGELCDWD

SEQ ID NO: 2796 - protein, 21 aa, Artificial Sequence
  Description of Artificial Sequence: Synthetic peptide
HRWYPCWLAHLGELCDLDPMS

SEQ ID NO: 2797 - protein, 16 aa, Artificial Sequence
  Description of Artificial Sequence: Synthetic peptide
FYPCWIAFVGELCDLE

SEQ ID NO: 2798 - protein, 20 aa, Artificial Sequence
  Description of Artificial Sequence: Synthetic peptide
EGHWYPCWIAQLGELCDLDW

SEQ ID NO: 2799 - protein, 22 aa, Artificial Sequence
  Description of Artificial Sequence: Synthetic peptide
WTGWSAFYPCSIANLGELCDLD

SEQ ID NO: 2800 - protein, 22 aa, Artificial Sequence
  Description of Artificial Sequence: Synthetic peptide
WEKLQNWYPCWIAQMGELCDLE

SEQ ID NO: 2801 - protein, 22 aa, Artificial Sequence
  Description of Artificial Sequence: Synthetic peptide
TNGVLDWWPCWMAQVGELCDLD

SEQ ID NO: 2802 - protein, 16 aa, Artificial Sequence
  Description of Artificial Sequence: Synthetic peptide
WYPCWVAKLGELCDLE

SEQ ID NO: 2803 - protein, 19 aa, Artificial Sequence
  Description of Artificial Sequence: Synthetic peptide
AYYPCELAQLGELCDLYNI

SEQ ID NO: 2804 - protein, 16 aa, Artificial Sequence
  Description of Artificial Sequence: Synthetic peptide
WYPCWMAHLGELCDLE

SEQ ID NO: 2805 - protein, 21 aa, Artificial Sequence
  Description of Artificial Sequence: Synthetic peptide
NDHTAWWPCYFAQVGDLCDLV

SEQ ID NO: 2806 - protein, 22 aa, Artificial Sequence
  Description of Artificial Sequence: Synthetic peptide
WWPCEIAQIGELCDLEWVRHAE

SEQ ID NO: 2807 - protein, 22 aa, Artificial Sequence
  Description of Artificial Sequence: Synthetic peptide
WWPCDFAQIGELCDLGPRFTGE

SEQ ID NO: 2808 - protein, 22 aa, Artificial Sequence
  Description of Artificial Sequence: Synthetic peptide
RDWWLPCEFALIGELCDLERSW

SEQ ID NO: 2809 - protein, 20 aa, Artificial Sequence
  Description of Artificial Sequence: Synthetic peptide
MRTTFWYDCYIAQVGELCDF

SEQ ID NO: 2810 - protein, 22 aa, Artificial Sequence
  Description of Artificial Sequence: Synthetic peptide
SWHAETWYPCWLAQVGELCDLD

SEQ ID NO: 2811 - protein, 20 aa, Artificial Sequence
  Description of Artificial Sequence: Synthetic peptide
EWFHDCFLAKVGDLCDLFLW

SEQ ID NO: 2812 - protein, 22 aa, Artificial Sequence
  Description of Artificial Sequence: Synthetic peptide
SGKTQMWNPCYVAKVGELCDLV

SEQ ID NO: 2813 - protein, 22 aa, Artificial Sequence
  Description of Artificial Sequence: Synthetic peptide
DKAGPNFYPCWLAHVGELCDQA

SEQ ID NO: 2814 - protein, 22 aa, Artificial Sequence
  Description of Artificial Sequence: Synthetic peptide
AGFRGRWWPCEYAQVGELCDLE

SEQ ID NO: 2815 - protein, 22 aa, Artificial Sequence
  Description of Artificial Sequence: Synthetic peptide
WFPCWLAKVGELCDRDDLAGPS

SEQ ID NO: 2816 - protein, 16 aa, Artificial Sequence
  Description of Artificial Sequence: Synthetic peptide
WWPCEWARIGELCDLE

SEQ ID NO: 2817 - protein, 20 aa, Artificial Sequence
  Description of Artificial Sequence: Synthetic peptide
KGSSWFPCYFAQVGDLCDLY

SEQ ID NO: 2818 - protein, 16 aa, Artificial Sequence
  Description of Artificial Sequence: Synthetic peptide
WYPCWLAQVGELCDRE

SEQ ID NO: 2819 - protein, 21 aa, Artificial Sequence
  Description of Artificial Sequence: Synthetic peptide
RGVYFPCWLAKVGDLCDSDEF

SEQ ID NO: 2820 - protein, 22 aa, Artificial Sequence
  Description of Artificial Sequence: Synthetic peptide
RAWWWPCELAQVGELCDLEPSS

SEQ ID NO: 2821 - protein, 16 aa, Artificial Sequence
  Description of Artificial Sequence: Synthetic peptide
WYPCWLAKVGELCDQE

SEQ ID NO: 2822 - protein, 20 aa, Artificial Sequence
  Description of Artificial Sequence: Synthetic peptide
RYVPDCLKAQVGDLCDFFAW

SEQ ID NO: 2823 - protein, 16 aa, Artificial Sequence
  Description of Artificial Sequence: Synthetic peptide
WWPCYLAQIGELCDLV

SEQ ID NO: 2824 - protein, 16 aa, Artificial Sequence
  Description of Artificial Sequence: Synthetic peptide
WYPCWMAKVGELCDME

SEQ ID NO: 2825 - protein, 22 aa, Artificial Sequence
  Description of Artificial Sequence: Synthetic peptide
QITDSGWYPCWVAKVGELCDMD

SEQ ID NO: 2826 - protein, 22 aa, Artificial Sequence
  Description of Artificial Sequence: Synthetic peptide
YRWWYPCDIAQVGELCDLDYLL

SEQ ID NO: 2827 - protein, 20 aa, Artificial Sequence
  Description of Artificial Sequence: Synthetic peptide
CYMHDCFMAQVGDLCDRFIS

SEQ ID NO: 2828 - protein, 16 aa, Artificial Sequence
  Description of Artificial Sequence: Synthetic peptide
WLPCWIAKIGDLCDLD

SEQ ID NO: 2829 - protein, 22 aa, Artificial Sequence
  Description of Artificial Sequence: Synthetic peptide
SRVWHPCWLARVGELCDLEVSD

SEQ ID NO: 2830 - protein, 22 aa, Artificial Sequence
  Description of Artificial Sequence: Synthetic peptide
WEHEFTWYPCWIAQVGELCDMD

SEQ ID NO: 2831 - protein, 22 aa, Artificial Sequence
  Description of Artificial Sequence: Synthetic peptide
HRGWVGWYPCEYALPGQLCDLE

SEQ ID NO: 2832 - protein, 21 aa, Artificial Sequence
  Description of Artificial Sequence: Synthetic peptide
WYPCWLAQLGELCDQDWDTPS

SEQ ID NO: 2833 - protein, 22 aa, Artificial Sequence
  Description of Artificial Sequence: Synthetic peptide
RVRRHSWWPCEIAVVGELCDLE

SEQ ID NO: 2834 - protein, 21 aa, Artificial Sequence
  Description of Artificial Sequence: Synthetic peptide
DGWWPCWIAQVGELCDLEDPV

SEQ ID NO: 2835 - protein, 20 aa, Artificial Sequence
  Description of Artificial Sequence: Synthetic peptide
LPFQDCYIAQVGELCDLPGT

SEQ ID NO: 2836 - protein, 20 aa, Artificial Sequence
  Description of Artificial Sequence: Synthetic peptide
RWMFDCLFARVGELCDIRPW

SEQ ID NO: 2837 - protein, 20 aa, Artificial Sequence
  Description of Artificial Sequence: Synthetic peptide
GGYYDCLIAEVGELCDMPGQ

SEQ ID NO: 2838 - protein, 20 aa, Artificial Sequence
  Description of Artificial Sequence: Synthetic peptide
VVCYACDIAHVGELCDLTCR

SEQ ID NO: 2839 - protein, 20 aa, Artificial Sequence
  Description of Artificial Sequence: Synthetic peptide
TPWYDCYIANVGDLCDFASA

SEQ ID NO: 2840 - protein, 20 aa, Artificial Sequence
  Description of Artificial Sequence: Synthetic peptide
LESLDCFFARIGDLCEIWDV

SEQ ID NO: 2841 - protein, 20 aa, Artificial Sequence
  Description of Artificial Sequence: Synthetic peptide
WQIFDCYLAQVGELCDLQDT

SEQ ID NO: 2842 - protein, 20 aa, Artificial Sequence
  Description of Artificial Sequence: Synthetic peptide
GRYPDCYIAHVGELCEFYDG

SEQ ID NO: 2843 - protein, 20 aa, Artificial Sequence
  Description of Artificial Sequence: Synthetic peptide
FGDDFCRFIPLFEMCTTDVE

SEQ ID NO: 2844 - protein, 20 aa, Artificial Sequence
  Description of Artificial Sequence: Synthetic peptide
LVYYDCYMAQVGELCDLPSL

SEQ ID NO: 2845 - protein, 20 aa, Artificial Sequence
  Description of Artificial Sequence: Synthetic peptide
VSRYDCYIAKVGELCDFFEF

SEQ ID NO: 2846 - protein, 20 aa, Artificial Sequence
  Description of Artificial Sequence: Synthetic peptide
VTVQDCYFARVGDLCDLFSP

SEQ ID NO: 2847 - protein, 20 aa, Artificial Sequence
  Description of Artificial Sequence: Synthetic peptide
WEWYDCLMAQVGELCDFEGN

SEQ ID NO: 2848 - protein, 20 aa, Artificial Sequence
  Description of Artificial Sequence: Synthetic peptide
WAFYDCRNAQVGDFCDLWEF

SEQ ID NO: 2849 - protein, 20 aa, Artificial Sequence
  Description of Artificial Sequence: Synthetic peptide
SMDQDCYFAQVGELCVLFNQ

SEQ ID NO: 2850 - protein, 20 aa, Artificial Sequence
  Description of Artificial Sequence: Synthetic peptide
GGYYDCLIAEVGELCDIYGR

SEQ ID NO: 2851 - protein, 20 aa, Artificial Sequence
  Description of Artificial Sequence: Synthetic peptide
SNWHDCLFAQVGELCDLPGS

SEQ ID NO: 2852 - protein, 14 aa, Artificial Sequence
  Description of Artificial Sequence: Synthetic peptide
YDCYIAQVGELCDI

SEQ ID NO: 2853 - protein, 20 aa, Artificial Sequence
  Description of Artificial Sequence: Synthetic peptide
SWLSDLQDCYIAQVGDLCQI

SEQ ID NO: 2854 - skipped

SEQ ID NO: 2855 - protein, 20 aa, Artificial Sequence
  Description of Artificial Sequence: Synthetic peptide
RLASDWWDCYIAKVGELCDF

SEQ ID NO: 2856 - protein, 20 aa, Artificial Sequence
  Description of Artificial Sequence: Synthetic peptide
RLLRDCFLAKVGDLCELFVW

SEQ ID NO: 2857 - protein, 20 aa, Artificial Sequence
  Description of Artificial Sequence: Synthetic peptide
QWFHNCFLARVGDTCDLFLW

SEQ ID NO: 2858 - protein, 20 aa, Artificial Sequence
  Description of Artificial Sequence: Synthetic peptide
ELLVDCFKVKVGELCDLFFG

SEQ ID NO: 2859 - protein, 20 aa, Artificial Sequence
  Description of Artificial Sequence: Synthetic peptide
RYVHDCFIAQVGDLCDLFLH

SEQ ID NO: 2860 - protein, 20 aa, Artificial Sequence
  Description of Artificial Sequence: Synthetic peptide
KWVHDCFLAKVGDVCDLFVV

SEQ ID NO: 2861 - protein, 20 aa, Artificial Sequence
  Description of Artificial Sequence: Synthetic peptide
RSLVDCFLVKVGDLCDFFNW

SEQ ID NO: 2862 - protein, 20 aa, Artificial Sequence
  Description of Artificial Sequence: Synthetic peptide
RYLYDCFLALVGDLCVKFHQ

SEQ ID NO: 2863 - protein, 20 aa, Artificial Sequence
  Description of Artificial Sequence: Synthetic peptide
AHFYDCFWAKAGELCDLWPS

SEQ ID NO: 2864 - protein, 20 aa, Artificial Sequence
  Description of Artificial Sequence: Synthetic peptide
KWFHDCFLAKVGDLCDLFLW

SEQ ID NO: 2865 - protein, 22 aa, Artificial Sequence
  Description of Artificial Sequence: Synthetic peptide
WGKLVRDCFLAKVGDLCDLFLW

SEQ ID NO: 2866 - protein, 20 aa, Artificial Sequence
  Description of Artificial Sequence: Synthetic peptide
THVHDCFLAKVGDLCDLFIV

SEQ ID NO: 2867 - protein, 20 aa, Artificial Sequence
  Description of Artificial Sequence: Synthetic peptide
HWVRDCFLAKVGELCDLFLW

SEQ ID NO: 2868 - protein, 20 aa, Artificial Sequence
  Description of Artificial Sequence: Synthetic peptide
HGILDCYFAKVGELCELFDW

SEQ ID NO: 2869 - protein, 20 aa, Artificial Sequence
  Description of Artificial Sequence: Synthetic peptide
QFVKDCFLAQVGDLCELFLW

SEQ ID NO: 2870 - protein, 20 aa, Artificial Sequence
  Description of Artificial Sequence: Synthetic peptide
DWLPDCYFANVGDLCSLFGS

SEQ ID NO: 2871 - protein, 20 aa, Artificial Sequence
  Description of Artificial Sequence: Synthetic peptide
HWFLDCFLANVGDLCDFFGN

SEQ ID NO: 2872 - protein, 20 aa, Artificial Sequence
  Description of Artificial Sequence: Synthetic peptide
NWLPDCLFANVGELCDIFPW

SEQ ID NO: 2873 - protein, 20 aa, Artificial Sequence
  Description of Artificial Sequence: Synthetic peptide
EIFKDCLFANVGELCEIFPS

SEQ ID NO: 2874 - protein, 20 aa, Artificial Sequence
  Description of Artificial Sequence: Synthetic peptide
NWFHDCFLARVGDLCDLFLD

SEQ ID NO: 2875 - protein, 20 aa, Artificial Sequence
  Description of Artificial Sequence: Synthetic peptide
YSFKDCYFAKVGELCELFLW

SEQ ID NO: 2876 - protein, 20 aa, Artificial Sequence
  Description of Artificial Sequence: Synthetic peptide
EFFHDCYVARVGELCDLFGW

SEQ ID NO: 2877 - protein, 16 aa, Artificial Sequence
  Description of Artificial Sequence: Synthetic peptide
SYLCWLDHWGVICEED

SEQ ID NO: 2878 - protein, 16 aa, Artificial Sequence
  Description of Artificial Sequence: Synthetic peptide
WYTCMMDWLGVHCELE

SEQ ID NO: 2879 - protein, 22 aa, Artificial Sequence
  Description of Artificial Sequence: Synthetic peptide
QMVWWDCWSTQEGPVCELNWTA

SEQ ID NO: 2880 - protein, 20 aa, Artificial Sequence
  Description of Artificial Sequence: Synthetic peptide
YWCSVWQLGSVCEMNNEETQ

SEQ ID NO: 2881 - protein, 22 aa, Artificial Sequence
  Description of Artificial Sequence: Synthetic peptide
WTCWLTQLGYDCNLDVVDQSLG

SEQ ID NO: 2882 - protein, 22 aa, Artificial Sequence
  Description of Artificial Sequence: Synthetic peptide
DGSWYTCWFTQLGEWCEQDDAK

SEQ ID NO: 2883 - protein, 22 aa, Artificial Sequence
  Description of Artificial Sequence: Synthetic peptide
EFWGWQCWQEPLGWSCDLEWMD

SEQ ID NO: 2884 - protein, 16 aa, Artificial Sequence
  Description of Artificial Sequence: Synthetic peptide
WYPCWIARVGELCDLE

SEQ ID NO: 2885 - protein, 16 aa, Artificial Sequence
  Description of Artificial Sequence: Synthetic peptide
WYPCWLAQVGELCDLD

SEQ ID NO: 2886 - protein, 16 aa, Artificial Sequence
  Description of Artificial Sequence: Synthetic peptide
LVDCFKVKVGELCDLF

SEQ ID NO: 2887 - protein, 16 aa, Artificial Sequence
  Description of Artificial Sequence: Synthetic peptide
VHDCFIAQVGDLCDLF

SEQ ID NO: 2888 - protein, 14 aa, Artificial Sequence
  Description of Artificial Sequence: Synthetic peptide
WPCWAALGELCDLD

SEQ ID NO: 2889 - protein, 13 aa, Artificial Sequence
  Description of Artificial Sequence: Synthetic peptide
WPCWALGELCDLD

SEQ ID NO: 2890 - protein, 12 aa, Artificial Sequence
  Description of Artificial Sequence: Synthetic peptide
WPCWLGELCDLD

SEQ ID NO: 2891 - protein, 12 aa, Artificial Sequence
  Description of Artificial Sequence: Synthetic peptide
WYPCWGELCDLD

SEQ ID NO: 2892-2899 - skipped (8 entries)

SEQ ID NO: 2900 - protein, 20 aa, Artificial Sequence
  Description of Artificial Sequence: Synthetic peptide
  MOD_RES (1)..(1): A, D, E, H, K, N, Q, R, or T
  MOD_RES (2)..(2): F, G, H, I, L, S, W, or Y
  MOD_RES (3)..(3): F, I, L, or V
  MOD_RES (4)..(4): H, K, L, P, R, V, or Y
  MOD_RES (7)..(7): F, L, or Y
  MOD_RES (8)..(8): F, I, K, L, V, or W
  MOD_RES (9)..(9): A or V
  MOD_RES (10)..(10): K, L, N, Q, or R
  MOD_RES (11)..(11): A or V
  MOD_RES (13)..(13): D or E
  MOD_RES (14)..(14): L, T, or V
  MOD_RES (16)..(16): D, E, S, or V
  MOD_RES (17)..(17): F, I, K, or L
  MOD_RES (18)..(18): F or W
  MOD_RES (19)..(19): D, F, G, I, L, N, P, or V
  MOD_RES (20)..(20): D, G, H, N, Q, S V, or W
XXXXDCXXXXXGXXCXXXXX

SEQ ID NO: 2901 - protein, 18 aa, Artificial Sequence
  Description of Artificial Sequence: Synthetic peptide
  MOD_RES (1)..(1): F, G, H, I, L, S, W, or Y
  MOD_RES (2)..(2): F, I, L, or V
  MOD_RES (3)..(3): H, K, L, P, R, V, or Y
  MOD_RES (6)..(6): F, L, or Y
  MOD_RES (7)..(7): F, I, K, L, V, or W
  MOD_RES (8)..(8): A or V
  MOD_RES (9)..(9): K, L, N, Q, or R
  MOD_RES (10)..(10): A or V
  MOD_RES (12)..(12): D or E
  MOD_RES (13)..(13): L, T, or V
  MOD_RES (15)..(15): D, E, S, or V
  MOD_RES (16)..(16): F, I, K, or L
  MOD_RES (17)..(17): F or W
  MOD_RES (18)..(18): D, F, G, I, L, N, P, or V
XXXDCXXXXXGXXCXXXX

SEQ ID NO: 2902 - protein, 16 aa, Artificial Sequence
  Description of Artificial Sequence: Synthetic peptide
  MOD_RES (1)..(1): F, I, L, or V
  MOD_RES (2)..(2): H, K, L, P, R, V, or Y
  MOD_RES (5)..(5): F, L, or Y
  MOD_RES (6)..(6): F, I, K, L, V, or W
  MOD_RES (7)..(7): A or V
  MOD_RES (8)..(8): K, L, N, Q, or R
  MOD_RES (9)..(9): A or V
  MOD_RES (11)..(11): D or E
  MOD_RES (12)..(12): L, T, or V
  MOD_RES (14)..(14): D, E, S, or V
  MOD_RES (15)..(15): F, I, K, or L
  MOD_RES (16)..(16): F or W
XXDCXXXXXGXXCXXX

SEQ ID NO: 2903 - protein, 14 aa, Artificial Sequence
  Description of Artificial Sequence: Synthetic peptide
  MOD_RES (1)..(1): H, K, L, P, R, V, or Y
  MOD_RES (4)..(4): F, L, or Y
  MOD_RES (5)..(5): F, I, K, L, V, or W
  MOD_RES (6)..(6): A or V
  MOD_RES (7)..(7): K, L, N, Q, or R
  MOD_RES (8)..(8): A or V
  MOD_RES (10)..(10): D or E
  MOD_RES (11)..(11): L, T, or V
  MOD_RES (13)..(13): D, E, S, or V
  MOD_RES (14)..(14): F, I, K, or L
XDCXXXXXGXXCXX

SEQ ID NO: 2904 - protein, 12 aa, Artificial Sequence
  Description of Artificial Sequence: Synthetic peptide
  MOD_RES (3)..(3): F, L, or Y
  MOD_RES (4)..(4): F, I, K, L, V, or W
  MOD_RES (5)..(5): A or V
  MOD_RES (6)..(6): K, L, N, Q, or R
  MOD_RES (7)..(7): A or V
  MOD_RES (9)..(9): D or E
  MOD_RES (10)..(10): L, T, or V
  MOD_RES (12)..(12): D, E, S, or V
DCXXXXXGXXCX

SEQ ID NO: 2905 - protein, 10 aa, Artificial Sequence
  Description of Artificial Sequence: Synthetic peptide
  MOD_RES (2)..(2): F, L, or Y
  MOD_RES (3)..(3): F, I, K, L, V, or W
  MOD_RES (4)..(4): A or V
  MOD_RES (5)..(5): K, L, N, Q, or R
  MOD_RES (6)..(6): A or V
  MOD_RES (8)..(8): D or E
  MOD_RES (9)..(9): L, T, or V
CXXXXXGXXC

SEQ ID NO: 2906 - protein, 8 aa, Artificial Sequence
  Description of Artificial Sequence: Synthetic peptide
  MOD_RES (1)..(1): F, L, or Y
  MOD_RES (2)..(2): F, I, K, L, V, or W
  MOD_RES (3)..(3): A or V
  MOD_RES (4)..(4): K, L, N, Q, or R
  MOD_RES (5)..(5): A or V
  MOD_RES (7)..(7): D or E
  MOD_RES (8)..(8): L, T, or V
XXXXXGXX

SEQ ID NO: 2907 - protein, 20 aa, Artificial Sequence
  Description of Artificial Sequence: Synthetic peptide
AFFHDCFFAKAGDLCDFFDD

SEQ ID NO: 2908 - protein, 20 aa, Artificial Sequence
  Description of Artificial Sequence: Synthetic peptide
DFFHDCFFAKVGDLCDFFFG

SEQ ID NO: 2909 - protein, 20 aa, Artificial Sequence
  Description of Artificial Sequence: Synthetic peptide
EGFHDCFFAKVGDLCDIFGH

SEQ ID NO: 2910 - protein, 20 aa, Artificial Sequence
  Description of Artificial Sequence: Synthetic peptide
EHFHDCFFAKVGDLCDIFGN

SEQ ID NO: 2911 - protein, 20 aa, Artificial Sequence
  Description of Artificial Sequence: Synthetic peptide
EHFHDCFFAKVGDLCDKFGQ

SEQ ID NO: 2912 - protein, 20 aa, Artificial Sequence
  Description of Artificial Sequence: Synthetic peptide
HIFHDCFIAKVGDLCDLFHS

SEQ ID NO: 2913 - protein, 20 aa, Artificial Sequence
  Description of Artificial Sequence: Synthetic peptide
HLFHDCFKAKVGDLCDLFIS

SEQ ID NO: 2914 - protein, 20 aa, Artificial Sequence
  Description of Artificial Sequence: Synthetic peptide
HLFKDCFLAKVGDLCDLFLS

SEQ ID NO: 2915 - protein, 22 aa, Artificial Sequence
  Description of Artificial Sequence: Synthetic peptide
WGKSIKDCFLAKVGDLCDLFLV

SEQ ID NO: 2916 - protein, 20 aa, Artificial Sequence
  Description of Artificial Sequence: Synthetic peptide
KSLKDCFLAKVGDLCDLFLV

SEQ ID NO: 2917 - protein, 20 aa, Artificial Sequence
  Description of Artificial Sequence: Synthetic peptide
KWLLDCFLALVGDLCDLFLW

SEQ ID NO: 2918 - protein, 20 aa, Artificial Sequence
  Description of Artificial Sequence: Synthetic peptide
NWLLDCFLANVGDLCDLFLW

SEQ ID NO: 2919 - protein, 20 aa, Artificial Sequence
  Description of Artificial Sequence: Synthetic peptide
NWLPDCFLANVGELCDLFLW

SEQ ID NO: 2920 - protein, 20 aa, Artificial Sequence
  Description of Artificial Sequence: Synthetic peptide
QWLPDCFLANVGELCDLFLW

SEQ ID NO: 2921 - protein, 20 aa, Artificial Sequence
  Description of Artificial Sequence: Synthetic peptide
QWVRDCLLANVGELCELFLW

SEQ ID NO: 2922 - protein, 20 aa, Artificial Sequence
  Description of Artificial Sequence: Synthetic peptide
RWVRDCLLAQVGELCELFNW

SEQ ID NO: 2923 - protein, 20 aa, Artificial Sequence
  Description of Artificial Sequence: Synthetic peptide
RWVVDCYLAQVGELCELFPW

SEQ ID NO: 2924 - protein, 20 aa, Artificial Sequence
  Description of Artificial Sequence: Synthetic peptide
RWVVDCYLARVGELCELFPW

SEQ ID NO: 2925 - protein, 20 aa, Artificial Sequence
  Description of Artificial Sequence: Synthetic peptide
TYVYDCYVVRVGETCSLFPW

SEQ ID NO: 2926 - protein, 20 aa, Artificial Sequence
  Description of Artificial Sequence: Synthetic peptide
YYVYNCYWVRVGEVCVLWVW

SEQ ID NO: 2927-2929 - skipped (3 entries)

SEQ ID NO: 2930 - protein, 24 aa, Artificial Sequence
  Description of Artificial Sequence: Synthetic peptide
GGWYPCWIARVGELCDLEEGPVNR

SEQ ID NO: 2931 - protein, 23 aa, Artificial Sequence
  Description of Artificial Sequence: Synthetic peptide
GGAVEFYPCWLARIGELCDLVEP

SEQ ID NO: 2932 - protein, 18 aa, Artificial Sequence
  Description of Artificial Sequence: Synthetic peptide
GGWYPCWIARVGELCDME

SEQ ID NO: 2933 - protein, 25 aa, Artificial Sequence
  Description of Artificial Sequence: Synthetic peptide
GGEWFHDCFLAKVGDLCDLFLGGEW

SEQ ID NO: 2934 - protein, 22 aa, Artificial Sequence
  Description of Artificial Sequence: Synthetic peptide
GGRYVHDCFIAQVGDLCDLFLH

SEQ ID NO: 2935 - protein, 22 aa, Artificial Sequence
  Description of Artificial Sequence: Synthetic peptide
GGRSLVDCFLVKVGDLCDFFNW

SEQ ID NO: 2936 - protein, 18 aa, Artificial Sequence
  Description of Artificial Sequence: Synthetic peptide
GGWYPCWIARVGELCDLE

SEQ ID NO: 2937 - protein, 18 aa, Artificial Sequence
  Description of Artificial Sequence: Synthetic peptide
GGWYPCWLAQVGELCDLD

SEQ ID NO: 2938 - protein, 18 aa, Artificial Sequence
  Description of Artificial Sequence: Synthetic peptide
GGLVDCFKVKVGELCDLF

SEQ ID NO: 2939 - protein, 18 aa, Artificial Sequence
  Description of Artificial Sequence: Synthetic peptide
GGWYSCWMAQLGELCDLD

SEQ ID NO: 2940 - protein, 22 aa, Artificial Sequence
  Description of Artificial Sequence: Synthetic peptide
GGRYLYDCFLALVGDLCVKFHQ

SEQ ID NO: 2941 - protein, 27 aa, Artificial Sequence
  Description of Artificial Sequence: Synthetic peptide
GGEWFHDCFLAKVGDLCDLFLGGEWGG

SEQ ID NO: 2942-3099 - skipped (158 entries)

SEQ ID NO: 3100 - protein, 22 aa, Artificial Sequence
  Description of Artificial Sequence: Synthetic peptide
ELLVDCFKVKVGELCDLFFGGG

SEQ ID NO: 3101 - protein, 21 aa, Artificial Sequence
  Description of Artificial Sequence: Synthetic peptide
ELLVDCFKVKVGELCDLFFGG

SEQ ID NO: 3102 - protein, 19 aa, Artificial Sequence
  Description of Artificial Sequence: Synthetic peptide
ELLVDCFKVKVGELCDLFF

SEQ ID NO: 3103 - protein, 18 aa, Artificial Sequence
  Description of Artificial Sequence: Synthetic peptide
ELLVDCFKVKVGELCDLF

SEQ ID NO: 3104 - protein, 17 aa, Artificial Sequence
  Description of Artificial Sequence: Synthetic peptide
ELLVDCFKVKVGELCDL

SEQ ID NO: 3105 - protein, 16 aa, Artificial Sequence
  Description of Artificial Sequence: Synthetic peptide
ELLVDCFKVKVGELCD

SEQ ID NO: 3106 - protein, 22 aa, Artificial Sequence
  Description of Artificial Sequence: Synthetic peptide
GGGELLVDCFKVKVGELCDLFF

SEQ ID NO: 3107 - protein, 21 aa, Artificial Sequence
  Description of Artificial Sequence: Synthetic peptide
GGELLVDCFKVKVGELCDLFF

SEQ ID NO: 3108 - protein, 20 aa, Artificial Sequence
  Description of Artificial Sequence: Synthetic peptide
GELLVDCFKVKVGELCDLFF

SEQ ID NO: 3109 - protein, 19 aa, Artificial Sequence
  Description of Artificial Sequence: Synthetic peptide
ELLVDCFKVKVGELCDLFF

SEQ ID NO: 3110 - protein, 18 aa, Artificial Sequence
  Description of Artificial Sequence: Synthetic peptide
LLVDCFKVKVGELCDLFF

SEQ ID NO: 3111 - protein, 17 aa, Artificial Sequence
  Description of Artificial Sequence: Synthetic peptide
LVDCFKVKVGELCDLFF

SEQ ID NO: 3112 - protein, 16 aa, Artificial Sequence
  Description of Artificial Sequence: Synthetic peptide
VDCFKVKVGELCDLFF

SEQ ID NO: 3113 - protein, 21 aa, Artificial Sequence
  Description of Artificial Sequence: Synthetic peptide
GELLVDCFKVKVGELCDLFFG

SEQ ID NO: 3114 - protein, 22 aa, Artificial Sequence
  Description of Artificial Sequence: Synthetic peptide
GGELLVDCFKVKVGELCDLFFG

SEQ ID NO: 3115 - protein, 23 aa, Artificial Sequence
  Description of Artificial Sequence: Synthetic peptide
GGGELLVDCFKVKVGELCDLFFG

SEQ ID NO: 3116 - protein, 22 aa, Artificial Sequence
  Description of Artificial Sequence: Synthetic peptide
GELLVDCFKVKVGELCDLFFGG

SEQ ID NO: 3117 - protein, 23 aa, Artificial Sequence
  Description of Artificial Sequence: Synthetic peptide
GGELLVDCFKVKVGELCDLFFGG

SEQ ID NO: 3118 - protein, 25 aa, Artificial Sequence
  Description of Artificial Sequence: Synthetic peptide
GGGELLVDCFKVKVGELCDLFFGGG

SEQ ID NO: 3119 - protein, 23 aa, Artificial Sequence
  Description of Artificial Sequence: Synthetic peptide
GELLVDCFKVKVGELCDLFFGGG

SEQ ID NO: 3120 - protein, 24 aa, Artificial Sequence
  Description of Artificial Sequence: Synthetic peptide
GGELLVDCFKVKVGELCDLFFGGG

SEQ ID NO: 3121 - protein, 25 aa, Artificial Sequence
  Description of Artificial Sequence: Synthetic peptide
GGGELLVDCFKVKVGELCDLFFGGG

SEQ ID NO: 3122 - protein, 20 aa, Artificial Sequence
  Description of Artificial Sequence: Synthetic peptide
GGELLVDCFKVKVGELCDLF

SEQ ID NO: 3123 - protein, 19 aa, Artificial Sequence
  Description of Artificial Sequence: Synthetic peptide
GGELLVDCFKVKVGELCDL

SEQ ID NO: 3124 - protein, 22 aa, Artificial Sequence
  Description of Artificial Sequence: Synthetic peptide
ELLVDCFKVKVGELCDLFFGGG

SEQ ID NO: 3125 - protein, 21 aa, Artificial Sequence
  Description of Artificial Sequence: Synthetic peptide
LLVDCFKVKVGELCDLFFGGG

SEQ ID NO: 3126 - protein, 20 aa, Artificial Sequence
  Description of Artificial Sequence: Synthetic peptide
LVDCFKVKVGELCDLFFGGG

SEQ ID NO: 3127 - protein, 19 aa, Artificial Sequence
  Description of Artificial Sequence: Synthetic peptide
VDCFKVKVGELCDLFFGGG

SEQ ID NO: 3128 - protein, 24 aa, Artificial Sequence
  Description of Artificial Sequence: Synthetic peptide
GGELLVDCFRVRVGELCDLFFGGG

SEQ ID NO: 3129 - skipped

SEQ ID NO: 3130 - protein, 23 aa, Artificial Sequence
  Description of Artificial Sequence: Synthetic peptide
RYVHDCFIAQVGDLCDLFLHGGG

SEQ ID NO: 3131 - protein, 22 aa, Artificial Sequence
  Description of Artificial Sequence: Synthetic peptide
RYVHDCFIAQVGDLCDLFLHGG

SEQ ID NO: 3132 - protein, 21 aa, Artificial Sequence
  Description of Artificial Sequence: Synthetic peptide
RYVHDCFIAQVGDLCDLFLHG

SEQ ID NO: 3133 - protein, 19 aa, Artificial Sequence
  Description of Artificial Sequence: Synthetic peptide
RYVHDCFIAQVGDLCDLFL

SEQ ID NO: 3134 - protein, 18 aa, Artificial Sequence
  Description of Artificial Sequence: Synthetic peptide
RYVHDCFIAQVGDLCDLF

SEQ ID NO: 3135 - protein, 17 aa, Artificial Sequence
  Description of Artificial Sequence: Synthetic peptide
RYVHDCFIAQVGDLCDL

SEQ ID NO: 3136 - protein, 23 aa, Artificial Sequence
  Description of Artificial Sequence: Synthetic peptide
GGGRYVHDCFIAQVGDLCDLFLH

SEQ ID NO: 3137 - protein, 22 aa, Artificial Sequence
  Description of Artificial Sequence: Synthetic peptide
GGRYVHDCFIAQVGDLCDLFLH

SEQ ID NO: 3138 - protein, 21 aa, Artificial Sequence
  Description of Artificial Sequence: Synthetic peptide
GRYVHDCFIAQVGDLCDLFLH

SEQ ID NO: 3139 - protein, 20 aa, Artificial Sequence
  Description of Artificial Sequence: Synthetic peptide
RYVHDCFIAQVGDLCDLFLH

SEQ ID NO: 3140 - protein, 19 aa, Artificial Sequence
  Description of Artificial Sequence: Synthetic peptide
YVHDCFIAQVGDLCDLFLH

SEQ ID NO: 3141 - protein, 18 aa, Artificial Sequence
  Description of Artificial Sequence: Synthetic peptide
VHDCFIAQVGDLCDLFLH

SEQ ID NO: 3142 - protein, 17 aa, Artificial Sequence
  Description of Artificial Sequence: Synthetic peptide
HDCFIAQVGDLCDLFLH

SEQ ID NO: 3143 - protein, 22 aa, Artificial Sequence
  Description of Artificial Sequence: Synthetic peptide
GRYVHDCFIAQVGDLCDLFLHG

SEQ ID NO: 3144 - protein, 23 aa, Artificial Sequence
  Description of Artificial Sequence: Synthetic peptide
GGRYVHDCFIAQVGDLCDLFLHG

SEQ ID NO: 3145 - protein, 24 aa, Artificial Sequence
  Description of Artificial Sequence: Synthetic peptide
GGGRYVHDCFIAQVGDLCDLFLHG

SEQ ID NO: 3146 - protein, 23 aa, Artificial Sequence
  Description of Artificial Sequence: Synthetic peptide
GRYVHDCFIAQVGDLCDLFLHGG

SEQ ID NO: 3147 - protein, 24 aa, Artificial Sequence
  Description of Artificial Sequence: Synthetic peptide
GGRYVHDCFIAQVGDLCDLFLHGG

SEQ ID NO: 3148 - protein, 26 aa, Artificial Sequence
  Description of Artificial Sequence: Synthetic peptide
GGGRYVHDCFIAQVGDLCDLFLHGGG

SEQ ID NO: 3149 - protein, 24 aa, Artificial Sequence
  Description of Artificial Sequence: Synthetic peptide
GRYVHDCFIAQVGDLCDLFLHGGG

SEQ ID NO: 3150 - protein, 25 aa, Artificial Sequence
  Description of Artificial Sequence: Synthetic peptide
GGRYVHDCFIAQVGDLCDLFLHGGG

SEQ ID NO: 3151 - protein, 26 aa, Artificial Sequence
  Description of Artificial Sequence: Synthetic peptide
GGGRYVHDCFIAQVGDLCDLFLHGGG

SEQ ID NO: 3152-3159 - skipped (8 entries)

SEQ ID NO: 3160 - protein, 20 aa, Artificial Sequence
  Description of Artificial Sequence: Synthetic peptide
  MOD_RES (1)..(1): R or A
  MOD_RES (8)..(8): I or A
  MOD_RES (10)..(10): Q or A
  MOD_RES (17)..(17): L or A
  MOD_RES (19)..(19): L or A
  MOD_RES (20)..(20): H or A
XYVHDCFXAXVGDLCDXFXX

SEQ ID NO: 3161 - protein, 20 aa, Artificial Sequence
  Description of Artificial Sequence: Synthetic peptide
RYVHDCFAAQVGDLCDLFLH

SEQ ID NO: 3162 - protein, 20 aa, Artificial Sequence
  Description of Artificial Sequence: Synthetic peptide
RYVHDCFIAQVGDLCDLFLA

SEQ ID NO: 3163 - protein, 20 aa, Artificial Sequence
  Description of Artificial Sequence: Synthetic peptide
RYVHDCFIAQVGDLCDAFLH

SEQ ID NO: 3164 - protein, 20 aa, Artificial Sequence
  Description of Artificial Sequence: Synthetic peptide
RYVHDCFIAAVGDLCDLFLH

SEQ ID NO: 3165 - protein, 20 aa, Artificial Sequence
  Description of Artificial Sequence: Synthetic peptide
RYVHDCFIAQVGDLCDLFAH

SEQ ID NO: 3166 - protein, 20 aa, Artificial Sequence
  Description of Artificial Sequence: Synthetic peptide
AYVHDCFIAQVGDLCDLFLH

SEQ ID NO: 3167-3168 - skipped (2 entries)

SEQ ID NO: 3169 - protein, 24 aa, Artificial Sequence
  Description of Artificial Sequence: Synthetic peptide
GGRYVHDCAIAQVGDLCDLFLHGG

SEQ ID NO: 3170 - protein, 24 aa, Artificial Sequence
  Description of Artificial Sequence: Synthetic peptide
GGRYVHDCFAAQVGDLCDLFLHGG

SEQ ID NO: 3171 - protein, 24 aa, Artificial Sequence
  Description of Artificial Sequence: Synthetic peptide
GGRYVHDCFIGQVGDLCDLFLHGG

SEQ ID NO: 3172 - protein, 24 aa, Artificial Sequence
  Description of Artificial Sequence: Synthetic peptide
GGRYVHDCFIAAVGDLCDLFLHGG

SEQ ID NO: 3173 - protein, 24 aa, Artificial Sequence
  Description of Artificial Sequence: Synthetic peptide
GGRYVHDCFIAQAGDLCDLFLHGG

SEQ ID NO: 3174 - protein, 24 aa, Artificial Sequence
  Description of Artificial Sequence: Synthetic peptide
GGRYVHDCFIAQVADLCDLFLHGG

SEQ ID NO: 3175 - protein, 24 aa, Artificial Sequence
  Description of Artificial Sequence: Synthetic peptide
GGRYVHDCFIAQVGALCDLFLHGG

SEQ ID NO: 3176 - protein, 24 aa, Artificial Sequence
  Description of Artificial Sequence: Synthetic peptide
GGRYVHDCFIAQVGDACDLFLHGG

SEQ ID NO: 3177 - protein, 24 aa, Artificial Sequence
  Description of Artificial Sequence: Synthetic peptide
GGAYVHDCFIAQVGDLCDLFLHGG

SEQ ID NO: 3178 - protein, 24 aa, Artificial Sequence
  Description of Artificial Sequence: Synthetic peptide
GGRAVHDCFIAQVGDLCDLFLHGG

SEQ ID NO: 3179 - protein, 24 aa, Artificial Sequence
  Description of Artificial Sequence: Synthetic peptide
GGRYAHDCFIAQVGDLCDLFLHGG

SEQ ID NO: 3180 - protein, 24 aa, Artificial Sequence
  Description of Artificial Sequence: Synthetic peptide
GGRYVADCFIAQVGDLCDLFLHGG

SEQ ID NO: 3181 - protein, 24 aa, Artificial Sequence
  Description of Artificial Sequence: Synthetic peptide
GGRYVHACFIAQVGDLCDLFLHGG

SEQ ID NO: 3182 - protein, 24 aa, Artificial Sequence
  Description of Artificial Sequence: Synthetic peptide
GGRYVHDCFIAQVGDLCDLFLAGG

SEQ ID NO: 3183 - protein, 24 aa, Artificial Sequence
  Description of Artificial Sequence: Synthetic peptide
GGRYVHDCFIAQVGDLCDLFAHGG

SEQ ID NO: 3184 - protein, 24 aa, Artificial Sequence
  Description of Artificial Sequence: Synthetic peptide
GGRYVHDCFIAQVGDLCDLALHGG

SEQ ID NO: 3185 - protein, 24 aa, Artificial Sequence
  Description of Artificial Sequence: Synthetic peptide
GGRYVHDCFIAQVGDLCDAFLHGG

SEQ ID NO: 3186 - protein, 24 aa, Artificial Sequence
  Description of Artificial Sequence: Synthetic peptide
GGRYVHDCFIAQVGDLCALFLHGG

SEQ ID NO: 3187-3199 - skipped (13 entries)

SEQ ID NO: 3200 - protein, 24 aa, Artificial Sequence
  Description of Artificial Sequence: Synthetic peptide
GGRYVHDCFIGAVGDLCDLFLHGG

SEQ ID NO: 3201 - protein, 24 aa, Artificial Sequence
  Description of Artificial Sequence: Synthetic peptide
GGRYVHDCFIGQVGDLCDLFAHGG

SEQ ID NO: 3202 - protein, 24 aa, Artificial Sequence
  Description of Artificial Sequence: Synthetic peptide
GGAYVHDCFIGQVGDLCDLFLHGG

SEQ ID NO: 3203 - protein, 24 aa, Artificial Sequence
  Description of Artificial Sequence: Synthetic peptide
GGRYVADCFIGQVGDLCDLFLHGG

SEQ ID NO: 3204 - protein, 24 aa, Artificial Sequence
  Description of Artificial Sequence: Synthetic peptide
GGRYVHDCFIGQVGDLCALFLHGG

SEQ ID NO: 3205 - protein, 24 aa, Artificial Sequence
  Description of Artificial Sequence: Synthetic peptide
GGRYVHDCFIGQVADLCDLFLHGG

SEQ ID NO: 3206 - protein, 24 aa, Artificial Sequence
  Description of Artificial Sequence: Synthetic peptide
GGRYVHDCFIGQAGDLCDLFLHGG

SEQ ID NO: 3207 - protein, 24 aa, Artificial Sequence
  Description of Artificial Sequence: Synthetic peptide
GGRYVHDCFIGQVGDACDLFLHGG

SEQ ID NO: 3208-4069 - skipped (862 entries)

SEQ ID NO: 4070 - protein, 47 aa, Artificial Sequence
  Description of Artificial Sequence: Synthetic polypeptide
GGWYPCWIARVGELCDLEEGPVNRGGGGSGGVVCQDWEGVELCWQGG

SEQ ID NO: 4071 - protein, 46 aa, Artificial Sequence
  Description of Artificial Sequence: Synthetic polypeptide
GGAVEFYPCWLARIGELCDLVEPGGGGSGGVVCQDWEGVELCWQGG

SEQ ID NO: 4072 - protein, 41 aa, Artificial Sequence
  Description of Artificial Sequence: Synthetic polypeptide
GGWYPCWIARVGELCDMEGGGGSGGVVCQDWEGVELCWQGG

SEQ ID NO: 4073 - protein, 45 aa, Artificial Sequence
  Description of Artificial Sequence: Synthetic polypeptide
GGEWFHDCFLAKVGDLCDLFLWGGGGSGGVVCQDWEGVELCWQGG

SEQ ID NO: 4074 - protein, 45 aa, Artificial Sequence
  Description of Artificial Sequence: Synthetic polypeptide
GGRYVHDCFIAQVGDLCDLFLHGGGGSGGVVCQDWEGVELCWQGG

SEQ ID NO: 4075 - protein, 45 aa, Artificial Sequence
  Description of Artificial Sequence: Synthetic polypeptide
GGRSLVDCFLVKVGDLCDFFNWGGGGSGGVVCQDWEGVELCWQGG

SEQ ID NO: 4076 - protein, 41 aa, Artificial Sequence
  Description of Artificial Sequence: Synthetic polypeptide
GGWYPCWIARVGELCDLEGGGGSGGVVCQDWEGVELCWQGG

SEQ ID NO: 4077 - protein, 41 aa, Artificial Sequence
  Description of Artificial Sequence: Synthetic polypeptide
GGWYPCWLAQVGELCDLDGGGGSGGVVCQDWEGVELCWQGG

SEQ ID NO: 4078 - protein, 52 aa, Artificial Sequence
  Description of Artificial Sequence: Synthetic polypeptide
GGWYPCWIARVGELCDLEEGPVNRGGGGSGGGGSGGVVCQDWEGVELCWQGG

SEQ ID NO: 4079 - protein, 57 aa, Artificial Sequence
  Description of Artificial Sequence: Synthetic polypeptide
GGWYPCWIARVGELCDLEEGPVNRGGGGSGGGGSGGGGSGGVVCQDWEGVELCWQGG

SEQ ID NO: 4080 - protein, 50 aa, Artificial Sequence
  Description of Artificial Sequence: Synthetic polypeptide
GGRYVHDCFIAQVGDLCDLFLHGGGGSGGGGSGGVVCQDWEGVELCWQGG

SEQ ID NO: 4081 - protein, 55 aa, Artificial Sequence
  Description of Artificial Sequence: Synthetic polypeptide
GGRYVHDCFIAQVGDLCDLFLHGGGGSGGGGSGGGGSGGVVCQDWEGVELCWQGG

SEQ ID NO: 4082 - protein, 60 aa, Artificial Sequence
  Description of Artificial Sequence: Synthetic polypeptide
GGRYVHDCFIAQVGDLCDLFLHGGGGSGGGGSGGGGSGGGGSGGVVCQDWEGVELCWQGG

SEQ ID NO: 4083 - protein, 41 aa, Artificial Sequence
  Description of Artificial Sequence: Synthetic polypeptide
GGLVDCFKVKVGELCDLFGGGGSGGVVCQDWEGVELCWQGG

SEQ ID NO: 4084 - protein, 45 aa, Artificial Sequence; identical to SEQ ID NO: 4074
  Description of Artificial Sequence: Synthetic polypeptide

SEQ ID NO: 4085 - protein, 41 aa, Artificial Sequence
  Description of Artificial Sequence: Synthetic polypeptide
GGWYSCWMAQLGELCDLDGGGGSGGVVCQDWEGVELCWQGG

SEQ ID NO: 4086-4089 - skipped (4 entries)

SEQ ID NO: 4090 - protein, 37 aa, Artificial Sequence; identical to SEQ ID NO: 1264
  Description of Artificial Sequence: Synthetic polypeptide

SEQ ID NO: 4091 - protein, 37 aa, Artificial Sequence
  Description of Artificial Sequence: Synthetic polypeptide
WYPCWMAQLGELCDLDGGGGSGGVVCQDWEGVALCWQ

SEQ ID NO: 4092 - protein, 37 aa, Artificial Sequence
  Description of Artificial Sequence: Synthetic polypeptide
  MOD_RES (6)..(6): Abu
WYPCWXAQLGELCDLDGGGGSGGVVCQDWEGVELCWQ

SEQ ID NO: 4093 - protein, 37 aa, Artificial Sequence
  Description of Artificial Sequence: Synthetic polypeptide
  MOD_RES (6)..(6): Abu
WYPCWXAQLGELCDLDGGGGSGGVVCQDWEGVALCWQ

SEQ ID NO: 4094 - protein, 37 aa, Artificial Sequence; identical to SEQ ID NO: 1264
  Description of Artificial Sequence: Synthetic polypeptide

SEQ ID NO: 4095 - protein, 45 aa, Artificial Sequence
  Description of Artificial Sequence: Synthetic polypeptide
GGELLVDCFKVKVGELCDLFFGGGGGSGGVVCQDWEGVELCWQGG

SEQ ID NO: 4096 - protein, 45 aa, Artificial Sequence; identical to SEQ ID NO: 4074
  Description of Artificial Sequence: Synthetic polypeptide

SEQ ID NO: 4097 - protein, 45 aa, Artificial Sequence
  Description of Artificial Sequence: Synthetic polypeptide
GGKWVHDCFLAKVGDVCDLFVVGGGGSGGVVCQDWEGVELCWQGG

SEQ ID NO: 4098 - protein, 45 aa, Artificial Sequence; identical to SEQ ID NO: 4075
  Description of Artificial Sequence: Synthetic polypeptide

SEQ ID NO: 4099 - protein, 45 aa, Artificial Sequence; identical to SEQ ID NO: 4073
  Description of Artificial Sequence: Synthetic polypeptide

SEQ ID NO: 4100-4101 - skipped (2 entries)

SEQ ID NO: 4102 - protein, 18 aa, Artificial Sequence
  Description of Artificial Sequence: Synthetic peptide
  See specification as filed for detailed description of substitutions and preferred embodiments
GPAPAPAPAPAPAPAPAG

SEQ ID NO: 4103 - protein, 16 aa, Artificial Sequence
  Description of Artificial Sequence: Synthetic peptide
  See specification as filed for detailed description of substitutions and preferred embodiments
GVVCQDWEGVELCWQG

SEQ ID NO: 4104 - protein, 21 aa, Artificial Sequence
  Description of Artificial Sequence: Synthetic peptide
  See specification as filed for detailed description of substitutions and preferred embodiments
GELLVDCFKVKVGELCDLFFG

SEQ ID NO: 4105 - protein, 21 aa, Artificial Sequence
  Description of Artificial Sequence: Synthetic peptide
  See specification as filed for detailed description of substitutions and preferred embodiments
GELLVDCFKVKVGELCDLFFG

SEQ ID NO: 4106 - protein, 39 aa, Artificial Sequence
  Description of Artificial Sequence: Synthetic polypeptide
  See specification as filed for detailed description of substitutions and preferred embodiments
GELLVDCFKVKVGELCDLFFGPAGVVCQDWEGVELCWQG

SEQ ID NO: 4107 - protein, 53 aa, Artificial Sequence
  Description of Artificial Sequence: Synthetic polypeptide
  See specification as filed for detailed description of substitutions and preferred embodiments
GELLVDCFKVKVGELCDLFFGPAPAPAPAPAPAPAPAGVVCQDWEGVELCWQG

SEQ ID NO: 4108 - protein, 39 aa, Artificial Sequence; identical to SEQ ID NO: 4106
  Description of Artificial Sequence: Synthetic polypeptide
  See specification as filed for detailed description of substitutions and preferred embodiments

SEQ ID NO: 4109 - protein, 38 aa, Artificial Sequence
  Description of Artificial Sequence: Synthetic polypeptide
  See specification as filed for detailed description of substitutions and preferred embodiments
GELLVDCFKVKVGELCDLFFPAGVVCQDWEGVELCWQG

SEQ ID NO: 4110 - protein, 38 aa, Artificial Sequence
  Description of Artificial Sequence: Synthetic polypeptide
  See specification as filed for detailed description of substitutions and preferred embodiments
GELLVDCFKVKVGELCDLFFGPAVVCQDWEGVELCWQG

SEQ ID NO: 4111 - protein, 37 aa, Artificial Sequence
  Description of Artificial Sequence: Synthetic polypeptide
  See specification as filed for detailed description of substitutions and preferred embodiments
GELLVDCFKVKVGELCDLFFPAVVCQDWEGVELCWQG

SEQ ID NO: 4112 - protein, 37 aa, Artificial Sequence
  Description of Artificial Sequence: Synthetic polypeptide
  See specification as filed for detailed description of substitutions and preferred embodiments
ELLVDCFKVKVGELCDLFFGPAGVVCQDWEGVELCWQ

SEQ ID NO: 4113 - protein, 38 aa, Artificial Sequence
  Description of Artificial Sequence: Synthetic polypeptide
  See specification as filed for detailed description of substitutions and preferred embodiments
ELLVDCFKVKVGELCDLFFGPAGVVCQDWEGVELCWQG

SEQ ID NO: 4114 - protein, 39 aa, Artificial Sequence
  Description of Artificial Sequence: Synthetic polypeptide
  See specification as filed for detailed description of substitutions and preferred embodiments
ELLVDCFKVKVGELCDLFFGPAGVVCQDWEGVELCWQGG

SEQ ID NO: 4115 - protein, 38 aa, Artificial Sequence
  Description of Artificial Sequence: Synthetic polypeptide
  See specification as filed for detailed description of substitutions and preferred embodiments
GELLVDCFKVKVGELCDLFFGPAGVVCQDWEGVELCWQ

SEQ ID NO: 4116 - protein, 39 aa, Artificial Sequence
  Description of Artificial Sequence: Synthetic polypeptide
  See specification as filed for detailed description of substitutions and preferred embodiments
GGELLVDCFKVKVGELCDLFFGPAGVVCQDWEGVELCWQ

SEQ ID NO: 4117 - protein, 40 aa, Artificial Sequence
  Description of Artificial Sequence: Synthetic polypeptide
  See specification as filed for detailed description of substitutions and preferred embodiments
GGGELLVDCFKVKVGELCDLFFGPAGVVCQDWEGVELCWQ

SEQ ID NO: 4118 - protein, 42 aa, Artificial Sequence
  Description of Artificial Sequence: Synthetic polypeptide
  See specification as filed for detailed description of substitutions and preferred embodiments
GGGELLVDCFKVKVGELCDLFFGPAGVVCQDWEGVELCWQGG

SEQ ID NO: 4119 - protein, 56 aa, Artificial Sequence
  Description of Artificial Sequence: Synthetic polypeptide
GGGELLVDCFKVKVGELCDLFFGPAPAPAPAPAPAPAPAGVVCQDWEGVELCWQGG

SEQ ID NO: 4120 - skipped

SEQ ID NO: 4121 - protein, 16 aa, Artificial Sequence
  Description of Artificial Sequence: Synthetic peptide
  See specification as filed for detailed description of substitutions and preferred embodiments
GVVCQDWEGVELCWQG

SEQ ID NO: 4122 - protein, 22 aa, Artificial Sequence
  Description of Artificial Sequence: Synthetic peptide
  See specification as filed for detailed description of substitutions and preferred embodiments
GRYVHDCFIAQVGDLCDLFLHG

SEQ ID NO: 4123 - protein, 22 aa, Artificial Sequence
  Description of Artificial Sequence: Synthetic peptide
  See specification as filed for detailed description of substitutions and preferred embodiments
GRYVHDCFIAQVGDLCDLFLHG

SEQ ID NO: 4124 - protein, 40 aa, Artificial Sequence
  Description of Artificial Sequence: Synthetic polypeptide
  See specification as filed for detailed description of substitutions and preferred embodiments
GRYVHDCFIAQVGDLCDLFLHGPAGVVCQDWEGVELCWQG

SEQ ID NO: 4125 - protein, 54 aa, Artificial Sequence
  Description of Artificial Sequence: Synthetic polypeptide
  See specification as filed for detailed description of substitutions and preferred embodiments
GRYVHDCFIAQVGDLCDLFLHGPAPAPAPAPAPAPAPAGVVCQDWEGVELCWQG

SEQ ID NO: 4126 - protein, 40 aa, Artificial Sequence; identical to SEQ ID NO: 4124
  Description of Artificial Sequence: Synthetic polypeptide
  See specification as filed for detailed description of substitutions and preferred embodiments

SEQ ID NO: 4127 - protein, 39 aa, Artificial Sequence
  Description of Artificial Sequence: Synthetic polypeptide
  See specification as filed for detailed description of substitutions and preferred embodiments
GRYVHDCFIAQVGDLCDLFLHPAGVVCQDWEGVELCWQG

SEQ ID NO: 4128 - protein, 39 aa, Artificial Sequence
  Description of Artificial Sequence: Synthetic polypeptide
  See specification as filed for detailed description of substitutions and preferred embodiments
GRYVHDCFIAQVGDLCDLFLHGPAVVCQDWEGVELCWQG

SEQ ID NO: 4129 - protein, 38 aa, Artificial Sequence
  Description of Artificial Sequence: Synthetic polypeptide
  See specification as filed for detailed description of substitutions and preferred embodiments
GRYVHDCFIAQVGDLCDLFLHPAVVCQDWEGVELCWQG

SEQ ID NO: 4130 - protein, 41 aa, Artificial Sequence
  Description of Artificial Sequence: Synthetic polypeptide
  See specification as filed for detailed description of substitutions and preferred embodiments
GRYVHDCFIAQVGDLCDLFLHGGPAGVVCQDWEGVELCWQG

SEQ ID NO: 4131 - protein, 37 aa, Artificial Sequence
  Description of Artificial Sequence: Synthetic polypeptide
  See specification as filed for detailed description of substitutions and preferred embodiments
RYVHDCFIAQVGDLCDLFLHPAGVVCQDWEGVELCWQ

SEQ ID NO: 4132 - protein, 38 aa, Artificial Sequence
  Description of Artificial Sequence: Synthetic polypeptide
  See specification as filed for detailed description of substitutions and preferred embodiments
RYVHDCFIAQVGDLCDLFLHPAGVVCQDWEGVELCWQG

SEQ ID NO: 4133 - protein, 39 aa, Artificial Sequence
  Description of Artificial Sequence: Synthetic polypeptide
  See specification as filed for detailed description of substitutions and preferred embodiments
RYVHDCFIAQVGDLCDLFLHPAGVVCQDWEGVELCWQGG

SEQ ID NO: 4134 - protein, 38 aa, Artificial Sequence
  Description of Artificial Sequence: Synthetic polypeptide
  See specification as filed for detailed description of substitutions and preferred embodiments
GRYVHDCFIAQVGDLCDLFLHPAGVVCQDWEGVELCWQ

SEQ ID NO: 4135 - protein, 39 aa, Artificial Sequence
  Description of Artificial Sequence: Synthetic polypeptide
  See specification as filed for detailed description of substitutions and preferred embodiments
GGRYVHDCFIAQVGDLCDLFLHPAGVVCQDWEGVELCWQ

SEQ ID NO: 4136 - protein, 41 aa, Artificial Sequence
  Description of Artificial Sequence: Synthetic polypeptide
  See specification as filed for detailed description of substitutions and preferred embodiments
GGRYVHDCFIAQVGDLCDLFLHPAGVVCQDWEGVELCWQGG

SEQ ID NO: 4137 - protein, 55 aa, Artificial Sequence
  Description of Artificial Sequence: Synthetic polypeptide
GGRYVHDCFIAQVGDLCDLFLHPAPAPAPAPAPAPAPAGVVCQDWEGVELCWQGG

SEQ ID NO: 4138-4159 - skipped (22 entries)

SEQ ID NO: 4160 - protein, 37 aa, Artificial Sequence; identical to SEQ ID NO: 1264
  Description of Artificial Sequence: Synthetic polypeptide

SEQ ID NO: 4161 - protein, 37 aa, Artificial Sequence; identical to SEQ ID NO: 4091
  Description of Artificial Sequence: Synthetic polypeptide

SEQ ID NO: 4162 - protein, 37 aa, Artificial Sequence; identical to SEQ ID NO: 4092
  Description of Artificial Sequence: Synthetic polypeptide
  MOD_RES (6)..(6): Abu

SEQ ID NO: 4163 - protein, 37 aa, Artificial Sequence; identical to SEQ ID NO: 4093
  Description of Artificial Sequence: Synthetic polypeptide
  MOD_RES (6)..(6): Abu

SEQ ID NO: 4164 - protein, 45 aa, Artificial Sequence; identical to SEQ ID NO: 4095
  Description of Artificial Sequence: Synthetic polypeptide

SEQ ID NO: 4165 - protein, 45 aa, Artificial Sequence; identical to SEQ ID NO: 4074
  Description of Artificial Sequence: Synthetic polypeptide

SEQ ID NO: 4166 - protein, 45 aa, Artificial Sequence; identical to SEQ ID NO: 4097
  Description of Artificial Sequence: Synthetic polypeptide

SEQ ID NO: 4167 - protein, 45 aa, Artificial Sequence; identical to SEQ ID NO: 4075
  Description of Artificial Sequence: Synthetic polypeptide

SEQ ID NO: 4168 - protein, 45 aa, Artificial Sequence; identical to SEQ ID NO: 4073
  Description of Artificial Sequence: Synthetic polypeptide

SEQ ID NO: 4169 - skipped

SEQ ID NO: 4170 - protein, 61 aa, Artificial Sequence
  Description of Artificial Sequence: Synthetic polypeptide
GGGELLVDCFKVKVGELCDLFFGGGGGSGGGGSGGGGSGGGGSGGVVCQDWEGVELCWQGG

SEQ ID NO: 4171 - protein, 56 aa, Artificial Sequence; identical to SEQ ID NO: 4119
  Description of Artificial Sequence: Synthetic polypeptide

SEQ ID NO: 4172 - protein, 46 aa, Artificial Sequence
  Description of Artificial Sequence: Synthetic polypeptide
WYPCWIARVGELCDLEEGPVNRGGGGGSGGVVCQDWEGVELCWQGG

SEQ ID NO: 4173 - protein, 51 aa, Artificial Sequence
  Description of Artificial Sequence: Synthetic polypeptide
GGGELLVDCFKVKVGELCDLFFGGGGGSGGGGSGGVVCQDWEGVELCWQGG

SEQ ID NO: 4174 - protein, 56 aa, Artificial Sequence
  Description of Artificial Sequence: Synthetic polypeptide
GGGELLVDCFKVKVGELCDLFFGGGGGSGGGGSGGGGSGGVVCQDWEGVELCWQGG

SEQ ID NO: 4175 - protein, 60 aa, Artificial Sequence; identical to SEQ ID NO: 4082
  Description of Artificial Sequence: Synthetic polypeptide

SEQ ID NO: 4176 - protein, 55 aa, Artificial Sequence; identical to SEQ ID NO: 4137
  Description of Artificial Sequence: Synthetic polypeptide

SEQ ID NO: 4177 - protein, 60 aa, Artificial Sequence
  Description of Artificial Sequence: Synthetic polypeptide
GGELLVDCFKVKVGELCDLFFGPAPAPAPAPAPAPAPAPAPAPAVVCQDWEGVELCWQGG

SEQ ID NO: 4178 - protein, 55 aa, Artificial Sequence
  Description of Artificial Sequence: Synthetic polypeptide
GGELLVDCFKVKVGELCDLFFGPAPAPAPAPAPAPAPAGVVCQDWEGVELCWQGG

SEQ ID NO: 4179 - protein, 49 aa, Artificial Sequence
  Description of Artificial Sequence: Synthetic polypeptide
LVDCFKVKVGELCDLFFGPAPAPAPAPAPAPAPAGVVCQDWEGVELCWQ

SEQ ID NO: 4180 - protein, 48 aa, Artificial Sequence
  Description of Artificial Sequence: Synthetic polypeptide
VDCFKVKVGELCDLFFGPAPAPAPAPAPAPAPAGVVCQDWEGVELCWQ

SEQ ID NO: 4181 - protein, 55 aa, Artificial Sequence
  Description of Artificial Sequence: Synthetic polypeptide
GGELLVDCFRVRVGELCDLFFGPAPAPAPAPAPAPAPAGVVCQDWEGVELCWQGG

SEQ ID NO: 4182 - protein, 55 aa, Artificial Sequence
  Description of Artificial Sequence: Synthetic polypeptide
GGRYVHDCFIAQVGDLCALFLHPAPAPAPAPAPAPAPAGVVCQDWEGVELCWQGG

SEQ ID NO: 4183 - protein, 55 aa, Artificial Sequence
  Description of Artificial Sequence: Synthetic polypeptide
GGRYVHDCFIAQAGDLCDLFLHPAPAPAPAPAPAPAPAGVVCQDWEGVELCWQGG

SEQ ID NO: 4184 - protein, 55 aa, Artificial Sequence
  Description of Artificial Sequence: Synthetic polypeptide
GGRYVHDCFIAQVGDACDLFLHPAPAPAPAPAPAPAPAGVVCQDWEGVELCWQGG

SEQ ID NO: 4185 - protein, 55 aa, Artificial Sequence
  Description of Artificial Sequence: Synthetic polypeptide
GGRYVHDCFIGQVGDLCDLFLHPAPAPAPAPAPAPAPAGVVCQDWEGVELCWQGG

SEQ ID NO: 4186-8060 - skipped (3875 entries)

SEQ ID NO: 8061 - protein, 295 aa, Artificial Sequence
  Description of Artificial Sequence: Synthetic polypeptide
ERKSSVECPPCPAPPVAGPSVFLFPPKPKDTLMISRTPEVTCVVVDVSHEDPEVQFNWYVDGVEVHNAKTKPREEQFNSTFRVVSVLTVVHQDWLNGKEYKCKVSNKGLPAPIEKTISKTKGQPREPQVYTLPPSREEMTKNQVSLTCLVKGFYPSDIAVEWESNGQPENNYKTTPPMLDSDGSFFLYSKLTVDKSRWQQGNVFSCSVMHEALHNHYTQKSLSLSPGAPAPAPAPAPAPAPAPAPAPAGGWYPCWIARVGELCDLEEGPVNRGGGGSGGVVCQDWEGVELCWQGG

SEQ ID NO: 8062 - protein, 294 aa, Artificial Sequence
  Description of Artificial Sequence: Synthetic polypeptide
ERKSSVECPPCPAPPVAGPSVFLFPPKPKDTLMISRTPEVTCVVVDVSHEDPEVQFNWYVDGVEVHNAKTKPREEQFNSTFRVVSVLTVVHQDWLNGKEYKCKVSNKGLPAPIEKTISKTKGQPREPQVYTLPPSREEMTKNQVSLTCLVKGFYPSDIAVEWESNGQPENNYKTTPPMLDSDGSFFLYSKLTVDKSRWQQGNVFSCSVMHEALHNHYTQKSLSLSPGAPAPAPAPAPAPAPAPAPAPAGGAVEFYPCWLARIGELCDLVEPGGGGSGGVVCQDWEGVELCWQGG

SEQ ID NO: 8063 - protein, 289 aa, Artificial Sequence
  Description of Artificial Sequence: Synthetic polypeptide
ERKSSVECPPCPAPPVAGPSVFLFPPKPKDTLMISRTPEVTCVVVDVSHEDPEVQFNWYVDGVEVHNAKTKPREEQFNSTFRVVSVLTVVHQDWLNGKEYKCKVSNKGLPAPIEKTISKTKGQPREPQVYTLPPSREEMTKNQVSLTCLVKGFYPSDIAVEWESNGQPENNYKTTPPMLDSDGSFFLYSKLTVDKSRWQQGNVFSCSVMHEALHNHYTQKSLSLSPGAPAPAPAPAPAPAPAPAPAPAGGWYPCWIARVGELCDMEGGGGSGGVVCQDWEGVELCWQGG

SEQ ID NO: 8064 - protein, 293 aa, Artificial Sequence
  Description of Artificial Sequence: Synthetic polypeptide
ERKSSVECPPCPAPPVAGPSVFLFPPKPKDTLMISRTPEVTCVVVDVSHEDPEVQFNWYVDGVEVHNAKTKPREEQFNSTFRVVSVLTVVHQDWLNGKEYKCKVSNKGLPAPIEKTISKTKGQPREPQVYTLPPSREEMTKNQVSLTCLVKGFYPSDIAVEWESNGQPENNYKTTPPMLDSDGSFFLYSKLTVDKSRWQQGNVFSCSVMHEALHNHYTQKSLSLSPGAPAPAPAPAPAPAPAPAPAPAGGEWFHDCFLAKVGDLCDLFLWGGGGSGGVVCQDWEGVELCWQGG

SEQ ID NO: 8065 - protein, 293 aa, Artificial Sequence
  Description of Artificial Sequence: Synthetic polypeptide
ERKSSVECPPCPAPPVAGPSVFLFPPKPKDTLMISRTPEVTCVVVDVSHEDPEVQFNWYVDGVEVHNAKTKPREEQFNSTFRVVSVLTVVHQDWLNGKEYKCKVSNKGLPAPIEKTISKTKGQPREPQVYTLPPSREEMTKNQVSLTCLVKGFYPSDIAVEWESNGQPENNYKTTPPMLDSDGSFFLYSKLTVDKSRWQQGNVFSCSVMHEALHNHYTQKSLSLSPGAPAPAPAPAPAPAPAPAPAPAGGRYVHDCFIAQVGDLCDLFLHGGGGSGGVVCQDWEGVELCWQGG

SEQ ID NO: 8066 - protein, 293 aa, Artificial Sequence
  Description of Artificial Sequence: Synthetic polypeptide
ERKSSVECPPCPAPPVAGPSVFLFPPKPKDTLMISRTPEVTCVVVDVSHEDPEVQFNWYVDGVEVHNAKTKPREEQFNSTFRVVSVLTVVHQDWLNGKEYKCKVSNKGLPAPIEKTISKTKGQPREPQVYTLPPSREEMTKNQVSLTCLVKGFYPSDIAVEWESNGQPENNYKTTPPMLDSDGSFFLYSKLTVDKSRWQQGNVFSCSVMHEALHNHYTQKSLSLSPGAPAPAPAPAPAPAPAPAPAPAGGRSLVDCFLVKVGDLCDFFNWGGGGSGGVVCQDWEGVELCWQGG

SEQ ID NO: 8067 - protein, 289 aa, Artificial Sequence
  Description of Artificial Sequence: Synthetic polypeptide
ERKSSVECPPCPAPPVAGPSVFLFPPKPKDTLMISRTPEVTCVVVDVSHEDPEVQFNWYVDGVEVHNAKTKPREEQFNSTFRVVSVLTVVHQDWLNGKEYKCKVSNKGLPAPIEKTISKTKGQPREPQVYTLPPSREEMTKNQVSLTCLVKGFYPSDIAVEWESNGQPENNYKTTPPMLDSDGSFFLYSKLTVDKSRWQQGNVFSCSVMHEALHNHYTQKSLSLSPGAPAPAPAPAPAPAPAPAPAPAGGWYPCWIARVGELCDLEGGGGSGGVVCQDWEGVELCWQGG

SEQ ID NO: 8068 - protein, 289 aa, Artificial Sequence
  Description of Artificial Sequence: Synthetic polypeptide
ERKSSVECPPCPAPPVAGPSVFLFPPKPKDTLMISRTPEVTCVVVDVSHEDPEVQFNWYVDGVEVHNAKTKPREEQFNSTFRVVSVLTVVHQDWLNGKEYKCKVSNKGLPAPIEKTISKTKGQPREPQVYTLPPSREEMTKNQVSLTCLVKGFYPSDIAVEWESNGQPENNYKTTPPMLDSDGSFFLYSKLTVDKSRWQQGNVFSCSVMHEALHNHYTQKSLSLSPGAPAPAPAPAPAPAPAPAPAPAGGWYPCWLAQVGELCDLDGGGGSGGVVCQDWEGVELCWQGG

SEQ ID NO: 8069 - protein, 300 aa, Artificial Sequence
  Description of Artificial Sequence: Synthetic polypeptide
ERKSSVECPPCPAPPVAGPSVFLFPPKPKDTLMISRTPEVTCVVVDVSHEDPEVQFNWYVDGVEVHNAKTKPREEQFNSTFRVVSVLTVVHQDWLNGKEYKCKVSNKGLPAPIEKTISKTKGQPREPQVYTLPPSREEMTKNQVSLTCLVKGFYPSDIAVEWESNGQPENNYKTTPPMLDSDGSFFLYSKLTVDKSRWQQGNVFSCSVMHEALHNHYTQKSLSLSPGAPAPAPAPAPAPAPAPAPAPAGGWYPCWIARVGELCDLEEGPVNRGGGGSGGGGSGGVVCQDWEGVELCWQGG

SEQ ID NO: 8070 - protein, 305 aa, Artificial Sequence
  Description of Artificial Sequence: Synthetic polypeptide
ERKSSVECPPCPAPPVAGPSVFLFPPKPKDTLMISRTPEVTCVVVDVSHEDPEVQFNWYVDGVEVHNAKTKPREEQFNSTFRVVSVLTVVHQDWLNGKEYKCKVSNKGLPAPIEKTISKTKGQPREPQVYTLPPSREEMTKNQVSLTCLVKGFYPSDIAVEWESNGQPENNYKTTPPMLDSDGSFFLYSKLTVDKSRWQQGNVFSCSVMHEALHNHYTQKSLSLSPGAPAPAPAPAPAPAPAPAPAPAGGWYPCWIARVGELCDLEEGPVNRGGGGSGGGGSGGGGSGGVVCQDWEGVELCWQGG

SEQ ID NO: 8071 - protein, 310 aa, Artificial Sequence
  Description of Artificial Sequence: Synthetic polypeptide
ERKSSVECPPCPAPPVAGPSVFLFPPKPKDTLMISRTPEVTCVVVDVSHEDPEVQFNWYVDGVEVHNAKTKPREEQFNSTFRVVSVLTVVHQDWLNGKEYKCKVSNKGLPAPIEKTISKTKGQPREPQVYTLPPSREEMTKNQVSLTCLVKGFYPSDIAVEWESNGQPENNYKTTPPMLDSDGSFFLYSKLTVDKSRWQQGNVFSCSVMHEALHNHYTQKSLSLSPGAPAPAPAPAPAPAPAPAPAPAGGWYPCWIARVGELCDLEEGPVNRGGGGSGGGGSGGGGSGGGGSGGVVCQDWEGVELCWQGG

SEQ ID NO: 8072 - protein, 298 aa, Artificial Sequence
  Description of Artificial Sequence: Synthetic polypeptide
ERKSSVECPPCPAPPVAGPSVFLFPPKPKDTLMISRTPEVTCVVVDVSHEDPEVQFNWYVDGVEVHNAKTKPREEQFNSTFRVVSVLTVVHQDWLNGKEYKCKVSNKGLPAPIEKTISKTKGQPREPQVYTLPPSREEMTKNQVSLTCLVKGFYPSDIAVEWESNGQPENNYKTTPPMLDSDGSFFLYSKLTVDKSRWQQGNVFSCSVMHEALHNHYTQKSLSLSPGAPAPAPAPAPAPAPAPAPAPAGGRYVHDCFIAQVGDLCDLFLHGGGGSGGGGSGGVVCQDWEGVELCWQGG

SEQ ID NO: 8073 - protein, 303 aa, Artificial Sequence
  Description of Artificial Sequence: Synthetic polypeptide
ERKSSVECPPCPAPPVAGPSVFLFPPKPKDTLMISRTPEVTCVVVDVSHEDPEVQFNWYVDGVEVHNAKTKPREEQFNSTFRVVSVLTVVHQDWLNGKEYKCKVSNKGLPAPIEKTISKTKGQPREPQVYTLPPSREEMTKNQVSLTCLVKGFYPSDIAVEWESNGQPENNYKTTPPMLDSDGSFFLYSKLTVDKSRWQQGNVFSCSVMHEALHNHYTQKSLSLSPGAPAPAPAPAPAPAPAPAPAPAGGRYVHDCFIAQVGDLCDLFLHGGGGSGGGGSGGGGSGGVVCQDWEGVELCWQGG

SEQ ID NO: 8074 - protein, 308 aa, Artificial Sequence
  Description of Artificial Sequence: Synthetic polypeptide
ERKSSVECPPCPAPPVAGPSVFLFPPKPKDTLMISRTPEVTCVVVDVSHEDPEVQFNWYVDGVEVHNAKTKPREEQFNSTFRVVSVLTVVHQDWLNGKEYKCKVSNKGLPAPIEKTISKTKGQPREPQVYTLPPSREEMTKNQVSLTCLVKGFYPSDIAVEWESNGQPENNYKTTPPMLDSDGSFFLYSKLTVDKSRWQQGNVFSCSVMHEALHNHYTQKSLSLSPGAPAPAPAPAPAPAPAPAPAPAGGRYVHDCFIAQVGDLCDLFLHGGGGSGGGGSGGGGSGGGGSGGVVCQDWEGVELCWQGG

SEQ ID NO: 8075 - protein, 288 aa, Artificial Sequence
  Description of Artificial Sequence: Synthetic polypeptide
DKTHTCPPCPAPEAAGGPSVFLFPPKPKDTLMISRTPEVTCVVVDVSHEDPEVKFNWYVDGVEVHNAKTKPREEQYNSTYRVVSVLTVLHQDWLNGKEYKCKVSNKALGAPIEKTISKAKGQPREPQVYVYPPSRDELTKNQVSLTCLVKGFYPSDIAVEWESNGQPENNYKTTPPVLDSDGSFALVSKLTVDKSRWQQGNVFSCSVMHEALHNHYTQKSLSLSPGAPAPAPAPAPAPAPAPAPAPAGGLVDCFKVKVGELCDLFGGGGSGGVVCQDWEGVELCWQGG

SEQ ID NO: 8076 - protein, 226 aa, Artificial Sequence
  Description of Artificial Sequence: Synthetic polypeptide
DKTHTCPPCPAPEAAGGPSVFLFPPKPKDTLMISRTPEVTCVVVDVSHEDPEVKFNWYVDGVEVHNAKTKPREEQYNSTYRVVSVLTVLHQDWLNGKEYKCKVSNKALGAPIEKTISKAKGQPREPQVYVLPPSRDELTKNQVSLLCLVKGFYPSDIAVEWESNGQPENNYLTWPPVLDSDGSFFLYSKLTVDKSRWQQGNVFSCSVMHEALHNHYTQKSLSLSPG

SEQ ID NO: 8077 - protein, 288 aa, Artificial Sequence
  Description of Artificial Sequence: Synthetic polypeptide
DKTHTCPPCPAPEAAGGPSVFLFPPKPKDTLMISRTPEVTCVVVDVSHEDPEVKFNWYVDGVEVHNAKTKPREEQYNSTYRVVSVLTVLHQDWLNGKEYKCKVSNKALGAPIEKTISKAKGQPREPQVYTLPPCRDELTKNQVSLWCLVKGFYPSDIAVEWESNGQPENNYKTTPPVLDSDGSFFLYSKLTVDKSRWQQGNVFSCSVMHEALHNHYTQKSLSLSPGAPAPAPAPAPAPAPAPAPAPAGGLVDCFKVKVGELCDLFGGGGSGGVVCQDWEGVELCWQGG

SEQ ID NO: 8078 - protein, 226 aa, Artificial Sequence
  Description of Artificial Sequence: Synthetic polypeptide
DKTHTCPPCPAPEAAGGPSVFLFPPKPKDTLMISRTPEVTCVVVDVSHEDPEVKFNWYVDGVEVHNAKTKPREEQYNSTYRVVSVLTVLHQDWLNGKEYKCKVSNKALGAPIEKTISKAKGQPREPQVCTLPPSRDELTKNQVSLSCAVKGFYPSDIAVEWESNGQPENNYKTTPPVLDSDGSFFLVSKLTVDKSRWQQGNVFSCSVMHEALHNHYTQKSLSLSPG

SEQ ID NO: 8079 - protein, 292 aa, Artificial Sequence
  Description of Artificial Sequence: Synthetic polypeptide
DKTHTCPPCPAPEAAGGPSVFLFPPKPKDTLMISRTPEVTCVVVDVSHEDPEVKFNWYVDGVEVHNAKTKPREEQYNSTYRVVSVLTVLHQDWLNGKEYKCKVSNKALGAPIEKTISKAKGQPREPQVYVYPPSRDELTKNQVSLTCLVKGFYPSDIAVEWESNGQPENNYKTTPPVLDSDGSFALVSKLTVDKSRWQQGNVFSCSVMHEALHNHYTQKSLSLSPGAPAPAPAPAPAPAPAPAPAPAGGRYVHDCFIAQVGDLCDLFLHGGGGSGGVVCQDWEGVELCWQGG

SEQ ID NO: 8080 - protein, 292 aa, Artificial Sequence
  Description of Artificial Sequence: Synthetic polypeptide
DKTHTCPPCPAPEAAGGPSVFLFPPKPKDTLMISRTPEVTCVVVDVSHEDPEVKFNWYVDGVEVHNAKTKPREEQYNSTYRVVSVLTVLHQDWLNGKEYKCKVSNKALGAPIEKTISKAKGQPREPQVYTLPPCRDELTKNQVSLWCLVKGFYPSDIAVEWESNGQPENNYKTTPPVLDSDGSFFLYSKLTVDKSRWQQGNVFSCSVMHEALHNHYTQKSLSLSPGAPAPAPAPAPAPAPAPAPAPAGGRYVHDCFIAQVGDLCDLFLHGGGGSGGVVCQDWEGVELCWQGG

SEQ ID NO: 8081 - protein, 287 aa, Artificial Sequence
  Description of Artificial Sequence: Synthetic polypeptide
DKTHTCPPCPAPEAAGGPSVFLFPPKPKDTLMISRTPEVTCVVVDVSHEDPEVKFNWYVDGVEVHNAKTKPREEQYNSTYRVVSVLTVLHQDWLNGKEYKCKVSNKALGAPIEKTISKAKGQPREPQVYVYPPSRDELTKNQVSLTCLVKGFYPSDIAVEWESNGQPENNYKTTPPVLDSDGSFALVSKLTVDKSRWQQGNVFSCSVMHEALHNHYTQKSLSLSPGGSGSGSGSGSGSGSGSGSGSGGWYSCWMAQLGELCDLDGGGGSGGVVCQDWEGVELCWQGG

SEQ ID NO: 8082 - protein, 287 aa, Artificial Sequence
  Description of Artificial Sequence: Synthetic polypeptide
DKTHTCPPCPAPEAAGGPSVFLFPPKPKDTLMISRTPEVTCVVVDVSHEDPEVKFNWYVDGVEVHNAKTKPREEQYNSTYRVVSVLTVLHQDWLNGKEYKCKVSNKALGAPIEKTISKAKGQPREPQVYTLPPCRDELTKNQVSLWCLVKGFYPSDIAVEWESNGQPENNYKTTPPVLDSDGSFFLYSKLTVDKSRWQQGNVFSCSVMHEALHNHYTQKSLSLSPGGSGSGSGSGSGSGSGSGSGSGGWYSCWMAQLGELCDLDGGGGSGGVVCQDWEGVELCWQGG

SEQ ID NO: 8083-8089 - skipped (7 entries)

SEQ ID NO: 8090 - protein, 227 aa, Artificial Sequence
  Description of Artificial Sequence: Synthetic polypeptide
ERKSSVECPPCPAPPVAGPSVFLFPPKPKDTLMISRTPEVTCVVVDVSHEDPEVQFNWYVDGVEVHNAKTKPREEQFNSTFRVVSVLTVVHQDWLNGKEYKCKVSNKGLPAPIEKTISKTKGQPREPQVYTLPPSREEMTKNQVSLTCLVKGFYPSDIAVEWESNGQPENNYKTTPPMLDSDGSFFLYSKLTVDKSRWQQGNVFSCSVMHEALHNHYTQKSLSLSPG

SEQ ID NO: 8091 - protein, 226 aa, Artificial Sequence
  Description of Artificial Sequence: Synthetic polypeptide
DKTHTCPPCPAPEAAGGPSVFLFPPKPKDTLMISRTPEVTCVVVDVSHEDPEVKFNWYVDGVEVHNAKTKPREEQYNSTYRVVSVLTVLHQDWLNGKEYKCKVSNKALGAPIEKTISKAKGQPREPQVYVYPPSRDELTKNQVSLTCLVKGFYPSDIAVEWESNGQPENNYKTTPPVLDSDGSFALVSKLTVDKSRWQQGNVFSCSVMHEALHNHYTQKSLSLSPG

SEQ ID NO: 8092 - protein, 226 aa, Artificial Sequence
  Description of Artificial Sequence: Synthetic polypeptide
DKTHTCPPCPAPEAAGGPSVFLFPPKPKDTLMISRTPEVTCVVVDVSHEDPEVKFNWYVDGVEVHNAKTKPREEQYNSTYRVVSVLTVLHQDWLNGKEYKCKVSNKALGAPIEKTISKAKGQPREPQVYTLPPCRDELTKNQVSLWCLVKGFYPSDIAVEWESNGQPENNYKTTPPVLDSDGSFFLYSKLTVDKSRWQQGNVFSCSVMHEALHNHYTQKSLSLSPG

SEQ ID NO: 8093 - protein, 227 aa, Artificial Sequence
  Description of Artificial Sequence: Synthetic polypeptide
APPCPPCPAPEFEGGPSVFLFPPKPKDTLMISRTPEVTCVVVDVSQEDPEVQFNWYVDGVEVHNAKTKPREEQFNSTYRVVSVLTVLHQDWLNGKEYKCKVSNKGLGSSIEKTISKAKGQPREPQVYTLPPSQEEMTKNQVSLTCLVKGFYPSDIAVEWESNGQPENNYKTTPPVLDSDGSFFLYSRLTVDKSRWQEGNVFSCSVMHEALHNHYTQKSLSLSLGART

SEQ ID NO: 8094-8099 - skipped (6 entries)

SEQ ID NO: 8100 - protein, 303 aa, Artificial Sequence
  Description of Artificial Sequence: Synthetic polypeptide
ERKSSVECPPCPAPPVAGPSVFLFPPKPKDTLMISRTPEVTCVVVDVSHEDPEVQFNWYVDGVEVHNAKTKPREEQFNSTFRVVSVLTVVHQDWLNGKEYKCKVSNKGLPAPIEKTISKTKGQPREPQVYTLPPSREEMTKNQVSLTCLVKGFYPSDIAVEWESNGQPENNYKTTPPMLDSDGSFFLYSKLTVDKSRWQQGNVFSCSVMHEALHNHYTQKSLSLSPGPAPAPAPAPAPAPAPAPAPAGGGELLVDCFKVKVGELCDLFFGGGGGSGGGGSGGGGSGGVVCQDWEGVELCWQGG

SEQ ID NO: 8101 - protein, 303 aa, Artificial Sequence
  Description of Artificial Sequence: Synthetic polypeptide
ERKSSVECPPCPAPPVAGPSVFLFPPKPKDTLMISRTPEVTCVVVDVSHEDPEVQFNWYVDGVEVHNAKTKPREEQFNSTFRVVSVLTVVHQDWLNGKEYKCKVSNKGLPAPIEKTISKTKGQPREPQVYTLPPSREEMTKNQVSLTCLVKGFYPSDIAVEWESNGQPENNYKTTPPMLDSDGSFFLYSKLTVDKSRWQQGNVFSCSVMHEALHNHYTQKSLSLSPGPAPAPAPAPAPAPAPAPAPAGGGELLVDCFKVKVGELCDLFFGPAPAPAPAPAPAPAPAGVVCQDWEGVELCWQGG

SEQ ID NO: 8102 - protein, 302 aa, Artificial Sequence
  Description of Artificial Sequence: Synthetic polypeptide
DKTHTCPPCPAPEAAGGPSVFLFPPKPKDTLMISRTPEVTCVVVDVSHEDPEVKFNWYVDGVEVHNAKTKPREEQYNSTYRVVSVLTVLHQDWLNGKEYKCKVSNKALGAPIEKTISKAKGQPREPQVYVYPPSRDELTKNQVSLTCLVKGFYPSDIAVEWESNGQPENNYKTTPPVLDSDGSFALVSKLTVDKSRWQQGNVFSCSVMHEALHNHYTQKSLSLSPGPAPAPAPAPAPAPAPAPAPAGGGELLVDCFKVKVGELCDLFFGGGGGSGGGGSGGGGSGGVVCQDWEGVELCWQGG

SEQ ID NO: 8103 - protein, 302 aa, Artificial Sequence
  Description of Artificial Sequence: Synthetic polypeptide
DKTHTCPPCPAPEAAGGPSVFLFPPKPKDTLMISRTPEVTCVVVDVSHEDPEVKFNWYVDGVEVHNAKTKPREEQYNSTYRVVSVLTVLHQDWLNGKEYKCKVSNKALGAPIEKTISKAKGQPREPQVYVYPPSRDELTKNQVSLTCLVKGFYPSDIAVEWESNGQPENNYKTTPPVLDSDGSFALVSKLTVDKSRWQQGNVFSCSVMHEALHNHYTQKSLSLSPGPAPAPAPAPAPAPAPAPAPAGGGELLVDCFKVKVGELCDLFFGPAPAPAPAPAPAPAPAGVVCQDWEGVELCWQGG

SEQ ID NO: 8104 - protein, 302 aa, Artificial Sequence
  Description of Artificial Sequence: Synthetic polypeptide
DKTHTCPPCPAPEAAGGPSVFLFPPKPKDTLMISRTPEVTCVVVDVSHEDPEVKFNWYVDGVEVHNAKTKPREEQYNSTYRVVSVLTVLHQDWLNGKEYKCKVSNKALGAPIEKTISKAKGQPREPQVYTLPPCRDELTKNQVSLWCLVKGFYPSDIAVEWESNGQPENNYKTTPPVLDSDGSFFLYSKLTVDKSRWQQGNVFSCSVMHEALHNHYTQKSLSLSPGPAPAPAPAPAPAPAPAPAPAGGGELLVDCFKVKVGELCDLFFGGGGGSGGGGSGGGGSGGVVCQDWEGVELCWQGG

SEQ ID NO: 8105 - protein, 302 aa, Artificial Sequence
  Description of Artificial Sequence: Synthetic polypeptide
DKTHTCPPCPAPEAAGGPSVFLFPPKPKDTLMISRTPEVTCVVVDVSHEDPEVKFNWYVDGVEVHNAKTKPREEQYNSTYRVVSVLTVLHQDWLNGKEYKCKVSNKALGAPIEKTISKAKGQPREPQVYTLPPCRDELTKNQVSLWCLVKGFYPSDIAVEWESNGQPENNYKTTPPVLDSDGSFFLYSKLTVDKSRWQQGNVFSCSVMHEALHNHYTQKSLSLSPGPAPAPAPAPAPAPAPAPAPAGGGELLVDCFKVKVGELCDLFFGPAPAPAPAPAPAPAPAGVVCQDWEGVELCWQGG

SEQ ID NO: 8106 - protein, 303 aa, Artificial Sequence; identical to SEQ ID NO: 8101
  Description of Artificial Sequence: Synthetic polypeptide

SEQ ID NO: 8107 - protein, 300 aa, Artificial Sequence
  Description of Artificial Sequence: Synthetic polypeptide
ERKSSVECPPCPAPPVAGPSVFLFPPKPKDTLMISRTPEVTCVVVDVSHEDPEVQFNWYVDGVEVHNAKTKPREEQFNSTFRVVSVLTVVHQDWLNGKEYKCKVSNKGLPAPIEKTISKTKGQPREPQVYTLPPSREEMTKNQVSLTCLVKGFYPSDIAVEWESNGQPENNYKTTPPMLDSDGSFFLYSKLTVDKSRWQQGNVFSCSVMHEALHNHYTQKSLSLSPGPAPAPAPAPAPAPAPAPAPALVDCFKVKVGELCDLFFGGGPAPAPAPAPAPAPAPAGVVCQDWEGVELCWQGG

SEQ ID NO: 8108 - protein, 299 aa, Artificial Sequence
  Description of Artificial Sequence: Synthetic polypeptide
ERKSSVECPPCPAPPVAGPSVFLFPPKPKDTLMISRTPEVTCVVVDVSHEDPEVQFNWYVDGVEVHNAKTKPREEQFNSTFRVVSVLTVVHQDWLNGKEYKCKVSNKGLPAPIEKTISKTKGQPREPQVYTLPPSREEMTKNQVSLTCLVKGFYPSDIAVEWESNGQPENNYKTTPPMLDSDGSFFLYSKLTVDKSRWQQGNVFSCSVMHEALHNHYTQKSLSLSPGPAPAPAPAPAPAPAPAPAPAVDCFKVKVGELCDLFFGGGPAPAPAPAPAPAPAPAGVVCQDWEGVELCWQGG

SEQ ID NO: 8109 - protein, 302 aa, Artificial Sequence
  Description of Artificial Sequence: Synthetic polypeptide
ERKSSVECPPCPAPPVAGPSVFLFPPKPKDTLMISRTPEVTCVVVDVSHEDPEVQFNWYVDGVEVHNAKTKPREEQFNSTFRVVSVLTVVHQDWLNGKEYKCKVSNKGLPAPIEKTISKTKGQPREPQVYTLPPSREEMTKNQVSLTCLVKGFYPSDIAVEWESNGQPENNYKTTPPMLDSDGSFFLYSKLTVDKSRWQQGNVFSCSVMHEALHNHYTQKSLSLSPGPAPAPAPAPAPAPAPAPAPAGGRYVHDCFIAQVGDLCDLFLHPAPAPAPAPAPAPAPAGVVCQDWEGVELCWQGG

SEQ ID NO: 8110 - protein, 302 aa, Artificial Sequence; identical to SEQ ID NO: 8109
  Description of Artificial Sequence: Synthetic polypeptide

SEQ ID NO: 8111 - protein, 283 aa, Artificial Sequence
  Description of Artificial Sequence: Synthetic polypeptide
APPCPPCPAPEFEGGPSVFLFPPKPKDTLMISRTPEVTCVVVDVSQEDPEVQFNWYVDGVEVHNAKTKPREEQFNSTYRVVSVLTVLHQDWLNGKEYKCKVSNKGLGSSIEKTISKAKGQPREPQVYTLPPSQEEMTKNQVSLTCLVKGFYPSDIAVEWESNGQPENNYKTTPPVLDSDGSFFLYSRLTVDKSRWQEGNVFSCSVMHEALHNHYTQKSLSLSLGARTGGGELLVDCFKVKVGELCDLFFGPAPAPAPAPAPAPAPAGVVCQDWEGVELCWQGG

SEQ ID NO: 8112 - protein, 303 aa, Artificial Sequence; identical to SEQ ID NO: 8101
  Description of Artificial Sequence: Synthetic polypeptide

SEQ ID NO: 8113 - protein, 304 aa, Artificial Sequence
  Description of Artificial Sequence: Synthetic polypeptide
ERKSSVECPPCPAPPVAGPSVFLFPPKPKDTLMISRTPEVTCVVVDVSHEDPEVQFNWYVDGVEVHNAKTKPREEQFNSTFRVVSVLTVVHQDWLNGKEYKCKVSNKGLPAPIEKTISKTKGQPREPQVYTLPPSREEMTKNQVSLTCLVKGFYPSDIAVEWESNGQPENNYKTTPPMLDSDGSFFLYSKLTVDKSRWQQGNVFSCSVMHEALHNHYTQKSLSLSPGPAPAPAPAPAPAPAPAPAPAGGELLVDCFRVRVGELCDLFFGGGPAPAPAPAPAPAPAPAGVVCQDWEGVELCWQGG

SEQ ID NO: 8114 - protein, 304 aa, Artificial Sequence
  Description of Artificial Sequence: Synthetic polypeptide
ERKSSVECPPCPAPPVAGPSVFLFPPKPKDTLMISRTPEVTCVVVDVSHEDPEVQFNWYVDGVEVHNAKTKPREEQFNSTFRVVSVLTVVHQDWLNGKEYKCKVSNKGLPAPIEKTISKTKGQPREPQVYTLPPSREEMTKNQVSLTCLVKGFYPSDIAVEWESNGQPENNYKTTPPMLDSDGSFFLYSKLTVDKSRWQQGNVFSCSVMHEALHNHYTQKSLSLSPGGSGSGSGSGSGSGSGSGSGSGGRYVHDCFAAQVGDLCDLFLHGGPAPAPAPAPAPAPAPAGVVCQDWEGVELCWQGG

SEQ ID NO: 8115 - protein, 304 aa, Artificial Sequence
  Description of Artificial Sequence: Synthetic polypeptide
ERKSSVECPPCPAPPVAGPSVFLFPPKPKDTLMISRTPEVTCVVVDVSHEDPEVQFNWYVDGVEVHNAKTKPREEQFNSTFRVVSVLTVVHQDWLNGKEYKCKVSNKGLPAPIEKTISKTKGQPREPQVYTLPPSREEMTKNQVSLTCLVKGFYPSDIAVEWESNGQPENNYKTTPPMLDSDGSFFLYSKLTVDKSRWQQGNVFSCSVMHEALHNHYTQKSLSLSPGGSGSGSGSGSGSGSGSGSGSGGRYVHDCFIAQVGDLCDLFLAGGPAPAPAPAPAPAPAPAGVVCQDWEGVELCWQGG

SEQ ID NO: 8116 - protein, 304 aa, Artificial Sequence
  Description of Artificial Sequence: Synthetic polypeptide
ERKSSVECPPCPAPPVAGPSVFLFPPKPKDTLMISRTPEVTCVVVDVSHEDPEVQFNWYVDGVEVHNAKTKPREEQFNSTFRVVSVLTVVHQDWLNGKEYKCKVSNKGLPAPIEKTISKTKGQPREPQVYTLPPSREEMTKNQVSLTCLVKGFYPSDIAVEWESNGQPENNYKTTPPMLDSDGSFFLYSKLTVDKSRWQQGNVFSCSVMHEALHNHYTQKSLSLSPGGSGSGSGSGSGSGSGSGSGSGGRYVHDCFIAQVGDLCDAFLHGGPAPAPAPAPAPAPAPAGVVCQDWEGVELCWQGG

SEQ ID NO: 8117 - protein, 304 aa, Artificial Sequence
  Description of Artificial Sequence: Synthetic polypeptide
ERKSSVECPPCPAPPVAGPSVFLFPPKPKDTLMISRTPEVTCVVVDVSHEDPEVQFNWYVDGVEVHNAKTKPREEQFNSTFRVVSVLTVVHQDWLNGKEYKCKVSNKGLPAPIEKTISKTKGQPREPQVYTLPPSREEMTKNQVSLTCLVKGFYPSDIAVEWESNGQPENNYKTTPPMLDSDGSFFLYSKLTVDKSRWQQGNVFSCSVMHEALHNHYTQKSLSLSPGGSGSGSGSGSGSGSGSGSGSGGRYVHDCFIAAVGDLCDLFLHGGPAPAPAPAPAPAPAPAGVVCQDWEGVELCWQGG

SEQ ID NO: 8118 - protein, 304 aa, Artificial Sequence
  Description of Artificial Sequence: Synthetic polypeptide
ERKSSVECPPCPAPPVAGPSVFLFPPKPKDTLMISRTPEVTCVVVDVSHEDPEVQFNWYVDGVEVHNAKTKPREEQFNSTFRVVSVLTVVHQDWLNGKEYKCKVSNKGLPAPIEKTISKTKGQPREPQVYTLPPSREEMTKNQVSLTCLVKGFYPSDIAVEWESNGQPENNYKTTPPMLDSDGSFFLYSKLTVDKSRWQQGNVFSCSVMHEALHNHYTQKSLSLSPGGSGSGSGSGSGSGSGSGSGSGGRYVHDCFIAQVGDLCDLFAHGGPAPAPAPAPAPAPAPAGVVCQDWEGVELCWQGG

SEQ ID NO: 8119 - protein, 304 aa, Artificial Sequence
  Description of Artificial Sequence: Synthetic polypeptide
ERKSSVECPPCPAPPVAGPSVFLFPPKPKDTLMISRTPEVTCVVVDVSHEDPEVQFNWYVDGVEVHNAKTKPREEQFNSTFRVVSVLTVVHQDWLNGKEYKCKVSNKGLPAPIEKTISKTKGQPREPQVYTLPPSREEMTKNQVSLTCLVKGFYPSDIAVEWESNGQPENNYKTTPPMLDSDGSFFLYSKLTVDKSRWQQGNVFSCSVMHEALHNHYTQKSLSLSPGGSGSGSGSGSGSGSGSGSGSGGAYVHDCFIAQVGDLCDLFLHGGPAPAPAPAPAPAPAPAGVVCQDWEGVELCWQGG

SEQ ID NO: 8120 - protein, 303 aa, Artificial Sequence
  Description of Artificial Sequence: Synthetic polypeptide
DKTHTCPPCPAPEAAGGPSVFLFPPKPKDTLMISRTPEVTCVVVDVSHEDPEVKFNWYVDGVEVHNAKTKPREEQYNSTYRVVSVLTVLHQDWLNGKEYKCKVSNKALGAPIEKTISKAKGQPREPQVYTLPPCRDELTKNQVSLWCLVKGFYPSDIAVEWESNGQPENNYKTTPPVLDSDGSFFLYSKLTVDKSRWQQGNVFSCSVMHEALHNHYTQKSLSLSPGGSGSGSGSGSGSGSGSGSGSGGRYVHDCFIGQVGDLCDLFLHGGPAPAPAPAPAPAPAPAGVVCQDWEGVELCWQGG

SEQ ID NO: 8121 - protein, 303 aa, Artificial Sequence
  Description of Artificial Sequence: Synthetic polypeptide
DKTHTCPPCPAPEAAGGPSVFLFPPKPKDTLMISRTPEVTCVVVDVSHEDPEVKFNWYVDGVEVHNAKTKPREEQYNSTYRVVSVLTVLHQDWLNGKEYKCKVSNKALGAPIEKTISKAKGQPREPQVYTLPPCRDELTKNQVSLWCLVKGFYPSDIAVEWESNGQPENNYKTTPPVLDSDGSFFLYSKLTVDKSRWQQGNVFSCSVMHEALHNHYTQKSLSLSPGGSGSGSGSGSGSGSGSGSGSGGRYVHDCFIAQVGDLCDLFLAGGPAPAPAPAPAPAPAPAGVVCQDWEGVELCWQGG

SEQ ID NO: 8122 - protein, 303 aa, Artificial Sequence
  Description of Artificial Sequence: Synthetic polypeptide
DKTHTCPPCPAPEAAGGPSVFLFPPKPKDTLMISRTPEVTCVVVDVSHEDPEVKFNWYVDGVEVHNAKTKPREEQYNSTYRVVSVLTVLHQDWLNGKEYKCKVSNKALGAPIEKTISKAKGQPREPQVYTLPPCRDELTKNQVSLWCLVKGFYPSDIAVEWESNGQPENNYKTTPPVLDSDGSFFLYSKLTVDKSRWQQGNVFSCSVMHEALHNHYTQKSLSLSPGGSGSGSGSGSGSGSGSGSGSGGRYVHDCFIAQVGDLCDAFLHGGPAPAPAPAPAPAPAPAGVVCQDWEGVELCWQGG

SEQ ID NO: 8123 - protein, 305 aa, Artificial Sequence
  Description of Artificial Sequence: Synthetic polypeptide
DKDKTHTCPPCPAPEAAGGPSVFLFPPKPKDTLMISRTPEVTCVVVDVSHEDPEVKFNWYVDGVEVHNAKTKPREEQYNSTYRVVSVLTVLHQDWLNGKEYKCKVSNKALGAPIEKTISKAKGQPREPQVYTLPPCRDELTKNQVSLWCLVKGFYPSDIAVEWESNGQPENNYKTTPPVLDSDGSFFLYSKLTVDKSRWQQGNVFSCSVMHEALHNHYTQKSLSLSPGGSGSGSGSGSGSGSGSGSGSGGRYVHDCFIAAVGDLCDLFLHGGPAPAPAPAPAPAPAPAGVVCQDWEGVELCWQGG

SEQ ID NO: 8124 - protein, 305 aa, Artificial Sequence
  Description of Artificial Sequence: Synthetic polypeptide
DKDKTHTCPPCPAPEAAGGPSVFLFPPKPKDTLMISRTPEVTCVVVDVSHEDPEVKFNWYVDGVEVHNAKTKPREEQYNSTYRVVSVLTVLHQDWLNGKEYKCKVSNKALGAPIEKTISKAKGQPREPQVYTLPPCRDELTKNQVSLWCLVKGFYPSDIAVEWESNGQPENNYKTTPPVLDSDGSFFLYSKLTVDKSRWQQGNVFSCSVMHEALHNHYTQKSLSLSPGGSGSGSGSGSGSGSGSGSGSGGRYVHDCFIAQVGDLCDLFAHGGPAPAPAPAPAPAPAPAGVVCQDWEGVELCWQGG

SEQ ID NO: 8125 - protein, 303 aa, Artificial Sequence
  Description of Artificial Sequence: Synthetic polypeptide
DKTHTCPPCPAPEAAGGPSVFLFPPKPKDTLMISRTPEVTCVVVDVSHEDPEVKFNWYVDGVEVHNAKTKPREEQYNSTYRVVSVLTVLHQDWLNGKEYKCKVSNKALGAPIEKTISKAKGQPREPQVYTLPPCRDELTKNQVSLWCLVKGFYPSDIAVEWESNGQPENNYKTTPPVLDSDGSFFLYSKLTVDKSRWQQGNVFSCSVMHEALHNHYTQKSLSLSPGGSGSGSGSGSGSGSGSGSGSGGAYVHDCFIAQVGDLCDLFLHGGPAPAPAPAPAPAPAPAGVVCQDWEGVELCWQGG

SEQ ID NO: 8126 - protein, 304 aa, Artificial Sequence
  Description of Artificial Sequence: Synthetic polypeptide
DKTDKTHTCPPCPAPEAAGGPSVFLFPPKPKDTLMISRTPEVTCVVVDVSHEDPEVKFNWYVDGVEVHNAKTKPREEQYNSTYRVVSVLTVLHQDWLNGKEYKCKVSNKALGAPIEKTISKAKGQPREPQVYTLPPCRDELTKNQVSLWCLVKGFYPSDIAVEWESNGQPENNYKTTPPVLDSDGSFFLYSKLTVDKSRWQQGNVFSCSVMHEALHNHYTQKSLSLSPGGSGSGSGSGSGSGSGSGSGSGGRYLYDCFLALVGDLCVKFHQPAPAPAPAPAPAPAPAGVVCQDWEGVELCWQGG

SEQ ID NO: 8127 - protein, 304 aa, Artificial Sequence
  Description of Artificial Sequence: Synthetic polypeptide
ERKSSVECPPCPAPPVAGPSVFLFPPKPKDTLMISRTPEVTCVVVDVSHEDPEVQFNWYVDGVEVHNAKTKPREEQFNSTFRVVSVLTVVHQDWLNGKEYKCKVSNKGLPAPIEKTISKTKGQPREPQVYTLPPSREEMTKNQVSLTCLVKGFYPSDIAVEWESNGQPENNYKTTPPMLDSDGSFFLYSKLTVDKSRWQQGNVFSCSVMHEALHNHYTQKSLSLSPGAGSGSGSGSGSGSGSGSGSGSGGGELLVDCFKVKVGELCDLFFGPAPAPAPAPAPAPAPAGVVCQDWEGVELCWQGG

SEQ ID NO: 8128 - protein, 303 aa, Artificial Sequence
  Description of Artificial Sequence: Synthetic polypeptide
ERKSSVECPPCPAPPVAGPSVFLFPPKPKDTLMISRTPEVTCVVVDVSHEDPEVQFNWYVDGVEVHNAKTKPREEQFNSTFRVVSVLTVVHQDWLNGKEYKCKVSNKGLPAPIEKTISKTKGQPREPQVYTLPPSREEMTKNQVSLTCLVKGFYPSDIAVEWESNGQPENNYKTTPPMLDSDGSFFLYSKLTVDKSRWQQGNVFSCSVMHEALHNHYTQKSLSLSPGAGSGSGSGSGSGSGSGSGSGSGGRYVHDCFIAQVGDLCDLFLHPAPAPAPAPAPAPAPAGVVCQDWEGVELCWQGG

SEQ ID NO: 8129 - protein, 305 aa, Artificial Sequence
  Description of Artificial Sequence: Synthetic polypeptide
ERKSSVECPPCPAPPVAGPSVFLFPPKPKDTLMISRTPEVTCVVVDVSHEDPEVQFNWYVDGVEVHNAKTKPREEQFNSTFRVVSVLTVVHQDWLNGKEYKCKVSNKGLPAPIEKTISKTKGQPREPQVYTLPPSREEMTKNQVSLTCLVKGFYPSDIAVEWESNGQPENNYKTTPPMLDSDGSFFLYSKLTVDKSRWQQGNVFSCSVMHEALHNHYTQKSLSLSPGAGSGSGSGSGSGSGSGSGSGSGGRYVHDCFAAQVGDLCDLFLHGGPAPAPAPAPAPAPAPAGVVCQDWEGVELCWQGG

SEQ ID NO: 8130 - protein, 305 aa, Artificial Sequence
  Description of Artificial Sequence: Synthetic polypeptide
ERKSSVECPPCPAPPVAGPSVFLFPPKPKDTLMISRTPEVTCVVVDVSHEDPEVQFNWYVDGVEVHNAKTKPREEQFNSTFRVVSVLTVVHQDWLNGKEYKCKVSNKGLPAPIEKTISKTKGQPREPQVYTLPPSREEMTKNQVSLTCLVKGFYPSDIAVEWESNGQPENNYKTTPPMLDSDGSFFLYSKLTVDKSRWQQGNVFSCSVMHEALHNHYTQKSLSLSPGAGSGSGSGSGSGSGSGSGSGSGGRYVHDCFIAQVGDLCDLFLAGGPAPAPAPAPAPAPAPAGVVCQDWEGVELCWQGG

SEQ ID NO: 8131 - protein, 305 aa, Artificial Sequence
  Description of Artificial Sequence: Synthetic polypeptide
ERKSSVECPPCPAPPVAGPSVFLFPPKPKDTLMISRTPEVTCVVVDVSHEDPEVQFNWYVDGVEVHNAKTKPREEQFNSTFRVVSVLTVVHQDWLNGKEYKCKVSNKGLPAPIEKTISKTKGQPREPQVYTLPPSREEMTKNQVSLTCLVKGFYPSDIAVEWESNGQPENNYKTTPPMLDSDGSFFLYSKLTVDKSRWQQGNVFSCSVMHEALHNHYTQKSLSLSPGAGSGSGSGSGSGSGSGSGSGSGGRYVHDCFIAQVGDLCDAFLHGGPAPAPAPAPAPAPAPAGVVCQDWEGVELCWQGG

SEQ ID NO: 8132 - protein, 305 aa, Artificial Sequence
  Description of Artificial Sequence: Synthetic polypeptide
ERKSSVECPPCPAPPVAGPSVFLFPPKPKDTLMISRTPEVTCVVVDVSHEDPEVQFNWYVDGVEVHNAKTKPREEQFNSTFRVVSVLTVVHQDWLNGKEYKCKVSNKGLPAPIEKTISKTKGQPREPQVYTLPPSREEMTKNQVSLTCLVKGFYPSDIAVEWESNGQPENNYKTTPPMLDSDGSFFLYSKLTVDKSRWQQGNVFSCSVMHEALHNHYTQKSLSLSPGAGSGSGSGSGSGSGSGSGSGSGGRYVHDCFIAAVGDLCDLFLHGGPAPAPAPAPAPAPAPAGVVCQDWEGVELCWQGG

SEQ ID NO: 8133 - protein, 305 aa, Artificial Sequence
  Description of Artificial Sequence: Synthetic polypeptide
ERKSSVECPPCPAPPVAGPSVFLFPPKPKDTLMISRTPEVTCVVVDVSHEDPEVQFNWYVDGVEVHNAKTKPREEQFNSTFRVVSVLTVVHQDWLNGKEYKCKVSNKGLPAPIEKTISKTKGQPREPQVYTLPPSREEMTKNQVSLTCLVKGFYPSDIAVEWESNGQPENNYKTTPPMLDSDGSFFLYSKLTVDKSRWQQGNVFSCSVMHEALHNHYTQKSLSLSPGAGSGSGSGSGSGSGSGSGSGSGGRYVHDCFIAQVGDLCDLFAHGGPAPAPAPAPAPAPAPAGVVCQDWEGVELCWQGG

SEQ ID NO: 8134 - protein, 305 aa, Artificial Sequence
  Description of Artificial Sequence: Synthetic polypeptide
ERKSSVECPPCPAPPVAGPSVFLFPPKPKDTLMISRTPEVTCVVVDVSHEDPEVQFNWYVDGVEVHNAKTKPREEQFNSTFRVVSVLTVVHQDWLNGKEYKCKVSNKGLPAPIEKTISKTKGQPREPQVYTLPPSREEMTKNQVSLTCLVKGFYPSDIAVEWESNGQPENNYKTTPPMLDSDGSFFLYSKLTVDKSRWQQGNVFSCSVMHEALHNHYTQKSLSLSPGAGSGSGSGSGSGSGSGSGSGSGGAYVHDCFIAQVGDLCDLFLHGGPAPAPAPAPAPAPAPAGVVCQDWEGVELCWQGG

SEQ ID NO: 8135 - protein, 289 aa, Artificial Sequence
  Description of Artificial Sequence: Synthetic polypeptide
ERKSSVECPPCPAPPVAGPSVFLFPPKPKDTLMISRTPEVTCVVVDVSHEDPEVQFNWYVDGVEVHNAKTKPREEQFNSTFRVVSVLTVVHQDWLNGKEYKCKVSNKGLPAPIEKTISKTKGQPREPQVYTLPPSREEMTKNQVSLTCLVKGFYPSDIAVEWESNGQPENNYKTTPPMLDSDGSFFLYSKLTVDKSRWQQGNVFSCSVMHEALHNHYTQKSLSLSPGAPAPAPAPAPAPAPAPAPAPAGGWYPCWMAQLGELCDLDGGGGSGGVVCQDWEGVELCWQGG

SEQ ID NO: 8136 - protein, 295 aa, Artificial Sequence
  Description of Artificial Sequence: Synthetic polypeptide
ERKSSVECPPCPAPPVAGPSVFLFPPKPKDTLMISRTPEVTCVVVDVSHEDPEVQFNWYVDGVEVHNAKTKPREEQFNSTFRVVSVLTVVHQDWLNGKEYKCKVSNKGLPAPIEKTISKTKGQPREPQVYTLPPSREEMTKNQVSLTCLVKGFYPSDIAVEWESNGQPENNYKTTPPMLDSDGSFFLYSKLTVDKSRWQQGNVFSCSVMHEALHNHYTQKSLSLSPGAGSGSGSGSGSGSGSGSGSGSGGVHRIPWCTLDPGGLQCAWLRQMGGGGSGGVVCQDWEGVELCWQGG

SEQ ID NO: 8137-8232 - skipped (96 entries)

SEQ ID NO: 8233 - protein, 305 aa, Artificial Sequence; identical to SEQ ID NO: 8133
  Description of Artificial Sequence: Synthetic polypeptide

SEQ ID NO: 8234-9000 - skipped (767 entries)

SEQ ID NO: 9001 - protein, 20 aa, Artificial Sequence
  Description of Artificial Sequence: Synthetic peptide
YPCWLARVGELCDLDSGDVH

SEQ ID NO: 9002 - protein, 20 aa, Artificial Sequence
  Description of Artificial Sequence: Synthetic peptide
APCWLARVGELCDLDSGDVH

SEQ ID NO: 9003 - protein, 20 aa, Artificial Sequence
  Description of Artificial Sequence: Synthetic peptide
APCALARVGELCDLDSGDVH

SEQ ID NO: 9004 - protein, 20 aa, Artificial Sequence
  Description of Artificial Sequence: Synthetic peptide
APCALAAVGELCDLDSGDVH

SEQ ID NO: 9005 - protein, 20 aa, Artificial Sequence
  Description of Artificial Sequence: Synthetic peptide
APCALAAVGALCDLDSGDVH

SEQ ID NO: 9006 - protein, 20 aa, Artificial Sequence
  Description of Artificial Sequence: Synthetic peptide
APCALAAVGALCDLASGDVH

SEQ ID NO: 9007 - protein, 20 aa, Artificial Sequence
  Description of Artificial Sequence: Synthetic peptide
APCALAAVGALCDLAAGDVH

SEQ ID NO: 9008-9010 - skipped (3 entries)

SEQ ID NO: 9011 - protein, 14 aa, Artificial Sequence
  Description of Artificial Sequence: Synthetic peptide
YWCWMAQVGELCDL

SEQ ID NO: 9012 - protein, 14 aa, Artificial Sequence
  Description of Artificial Sequence: Synthetic peptide
YHCWMAQVGELCDL

SEQ ID NO: 9013 - protein, 14 aa, Artificial Sequence
  Description of Artificial Sequence: Synthetic peptide
YHCWMGQVGELCDL

SEQ ID NO: 9014 - protein, 14 aa, Artificial Sequence
  Description of Artificial Sequence: Synthetic peptide
YHCWMGQMGELCDL

SEQ ID NO: 9015 - protein, 14 aa, Artificial Sequence
  Description of Artificial Sequence: Synthetic peptide
YHCWMGQMGELCEL

SEQ ID NO: 9016 - protein, 14 aa, Artificial Sequence
  Description of Artificial Sequence: Synthetic peptide
YHCWMGQMGELCEM

SEQ ID NO: 9017-9020 - skipped (4 entries)

SEQ ID NO: 9021 - protein, 20 aa, Artificial Sequence
  Description of Artificial Sequence: Synthetic peptide
MGFYPCWTAQLGELCDLSVD

SEQ ID NO: 9022 - protein, 19 aa, Artificial Sequence
  Description of Artificial Sequence: Synthetic peptide
GFYPCWTAQLGELCDLSVD

SEQ ID NO: 9023 - protein, 18 aa, Artificial Sequence
  Description of Artificial Sequence: Synthetic peptide
FYPCWTAQLGELCDLSVD

SEQ ID NO: 9024 - protein, 17 aa, Artificial Sequence
  Description of Artificial Sequence: Synthetic peptide
YPCWTAQLGELCDLSVD

SEQ ID NO: 9025 - protein, 19 aa, Artificial Sequence
  Description of Artificial Sequence: Synthetic peptide
MGFYPCWTAQLGELCDLSV

SEQ ID NO: 9026 - protein, 18 aa, Artificial Sequence
  Description of Artificial Sequence: Synthetic peptide
MGFYPCWTAQLGELCDLS

SEQ ID NO: 9027 - protein, 17 aa, Artificial Sequence
  Description of Artificial Sequence: Synthetic peptide
MGFYPCWTAQLGELCDL

SEQ ID NO: 9028 - protein, 18 aa, Artificial Sequence
  Description of Artificial Sequence: Synthetic peptide
GFYPCWTAQLGELCDLSV

SEQ ID NO: 9029 - protein, 15 aa, Artificial Sequence
  Description of Artificial Sequence: Synthetic peptide
FYPCWTAQLGELCDL

SEQ ID NO: 9030 - skipped

SEQ ID NO: 9031 - protein, 14 aa, Artificial Sequence
  Description of Artificial Sequence: Synthetic peptide
KYCGFAQLGELCVL

SEQ ID NO: 9032 - protein, 15 aa, Artificial Sequence
  Description of Artificial Sequence: Synthetic peptide
GKYCGFAQLGELCVL

SEQ ID NO: 9033 - protein, 16 aa, Artificial Sequence
  Description of Artificial Sequence: Synthetic peptide
GGKYCGFAQLGELCVL

SEQ ID NO: 9034 - protein, 17 aa, Artificial Sequence
  Description of Artificial Sequence: Synthetic peptide
GGGKYCGFAQLGELCVL

SEQ ID NO: 9035 - protein, 15 aa, Artificial Sequence
  Description of Artificial Sequence: Synthetic peptide
KYCGFAQLGELCVLG

SEQ ID NO: 9036 - protein, 16 aa, Artificial Sequence
  Description of Artificial Sequence: Synthetic peptide
KYCGFAQLGELCVLGG

SEQ ID NO: 9037 - protein, 17 aa, Artificial Sequence
  Description of Artificial Sequence: Synthetic peptide
KYCGFAQLGELCVLGGG

SEQ ID NO: 9038 - protein, 16 aa, Artificial Sequence
  Description of Artificial Sequence: Synthetic peptide
GKYCGFAQLGELCVLG

SEQ ID NO: 9039 - protein, 17 aa, Artificial Sequence
  Description of Artificial Sequence: Synthetic peptide
GGKYCGFAQLGELCVLG

SEQ ID NO: 9040-9300 - skipped (261 entries)

SEQ ID NO: 9301 - protein, 20 aa, Artificial Sequence
  Description of Artificial Sequence: Synthetic peptide
GGWYPCWMAQLGELCDLDGG

SEQ ID NO: 9302 - protein, 19 aa, Artificial Sequence
  Description of Artificial Sequence: Synthetic peptide
GWYPCWMAQLGELCDLDGG

SEQ ID NO: 9303 - protein, 18 aa, Artificial Sequence
  Description of Artificial Sequence: Synthetic peptide
WYPCWMAQLGELCDLDGG

SEQ ID NO: 9304 - protein, 17 aa, Artificial Sequence
  Description of Artificial Sequence: Synthetic peptide
YPCWMAQLGELCDLDGG

SEQ ID NO: 9305 - protein, 16 aa, Artificial Sequence
  Description of Artificial Sequence: Synthetic peptide
PCWMAQLGELCDLDGG

SEQ ID NO: 9306 - protein, 15 aa, Artificial Sequence
  Description of Artificial Sequence: Synthetic peptide
CWMAQLGELCDLDGG

SEQ ID NO: 9307 - protein, 19 aa, Artificial Sequence
  Description of Artificial Sequence: Synthetic peptide
GGWYPCWMAQLGELCDLDG

SEQ ID NO: 9308 - protein, 18 aa, Artificial Sequence
  Description of Artificial Sequence: Synthetic peptide
GGWYPCWMAQLGELCDLD

SEQ ID NO: 9309 - protein, 17 aa, Artificial Sequence
  Description of Artificial Sequence: Synthetic peptide
GGWYPCWMAQLGELCDL

SEQ ID NO: 9310 - protein, 16 aa, Artificial Sequence
  Description of Artificial Sequence: Synthetic peptide
GGWYPCWMAQLGELCD

SEQ ID NO: 9311 - protein, 15 aa, Artificial Sequence
  Description of Artificial Sequence: Synthetic peptide
GGWYPCWMAQLGELC

SEQ ID NO: 9312 - protein, 18 aa, Artificial Sequence
  Description of Artificial Sequence: Synthetic peptide
GWYPCWMAQLGELCDLDG

SEQ ID NO: 9313 - protein, 17 aa, Artificial Sequence
  Description of Artificial Sequence: Synthetic peptide
WYPCWMAQLGELCDLDG

SEQ ID NO: 9314 - protein, 9 aa, Artificial Sequence
  Description of Artificial Sequence: Synthetic peptide
PCWMAQLGE

SEQ ID NO: 9315-9339 - skipped (25 entries)

SEQ ID NO: 9340 - protein, 18 aa, Artificial Sequence
  Description of Artificial Sequence: Synthetic peptide
GGVVCQDWEGVELCWQGG

SEQ ID NO: 9341 - protein, 17 aa, Artificial Sequence
  Description of Artificial Sequence: Synthetic peptide
GVVCQDWEGVELCWQGG

SEQ ID NO: 9342 - protein, 16 aa, Artificial Sequence
  Description of Artificial Sequence: Synthetic peptide
VVCQDWEGVELCWQGG

SEQ ID NO: 9343 - protein, 15 aa, Artificial Sequence
  Description of Artificial Sequence: Synthetic peptide
VCQDWEGVELCWQGG

SEQ ID NO: 9344 - protein, 14 aa, Artificial Sequence
  Description of Artificial Sequence: Synthetic peptide
CQDWEGVELCWQGG

SEQ ID NO: 9345 - protein, 17 aa, Artificial Sequence
  Description of Artificial Sequence: Synthetic peptide
GGVVCQDWEGVELCWQG

SEQ ID NO: 9346 - protein, 16 aa, Artificial Sequence
  Description of Artificial Sequence: Synthetic peptide
GGVVCQDWEGVELCWQ

SEQ ID NO: 9347 - protein, 15 aa, Artificial Sequence
  Description of Artificial Sequence: Synthetic peptide
GGVVCQDWEGVELCW

SEQ ID NO: 9348 - protein, 14 aa, Artificial Sequence
  Description of Artificial Sequence: Synthetic peptide
GGVVCQDWEGVELC

SEQ ID NO: 9349 - protein, 16 aa, Artificial Sequence
  Description of Artificial Sequence: Synthetic peptide
GVVCQDWEGVELCWQG

SEQ ID NO: 9350 - protein, 13 aa, Artificial Sequence
  Description of Artificial Sequence: Synthetic peptide
VCQDWEGVELCWQ

SEQ ID NO: 9351 - protein, 12 aa, Artificial Sequence
  Description of Artificial Sequence: Synthetic peptide
VCQDWEGVELCW

SEQ ID NO: 9352 - protein, 11 aa, Artificial Sequence
  Description of Artificial Sequence: Synthetic peptide
CQDWEGVELCW

SEQ ID NO: 9353 - protein, 10 aa, Artificial Sequence
  Description of Artificial Sequence: Synthetic peptide
CQDWEGVELC

SEQ ID NO: 9354-9378 - skipped (25 entries)

SEQ ID NO: 9379 - protein, 10 aa, Artificial Sequence
  Description of Artificial Sequence: Synthetic peptide
  SITE (1)..(10): This sequence may encompass 1-10 residues
GGGGGGGGGG

SEQ ID NO: 9380 - protein, 20 aa, Artificial Sequence
  Description of Artificial Sequence: Synthetic peptide
  SITE (1)..(20): This sequence may encompass 1-20 residues
GGGGGGGGGGGGGGGGGGGG

SEQ ID NO: 9381 - protein, 40 aa, Artificial Sequence
  Description of Artificial Sequence: Synthetic polypeptide
  SITE (1)..(40): This sequence may encompass 1-20 "Gly Ser" repeating units
GSGSGSGSGSGSGSGSGSGSGSGSGSGSGSGSGSGSGSGS

SEQ ID NO: 9382 - protein, 60 aa, Artificial Sequence
  Description of Artificial Sequence: Synthetic polypeptide
  SITE (1)..(60): This sequence may encompass 1-20 "Gly Gly Ser" repeating units
GGSGGSGGSGGSGGSGGSGGSGGSGGSGGSGGSGGSGGSGGSGGSGGSGGSGGSGGSGGS

SEQ ID NO: 9383 - protein, 80 aa, Artificial Sequence
  Description of Artificial Sequence: Synthetic polypeptide
  SITE (1)..(80): This sequence may encompass 1-20 "Gly Gly Gly Ser" repeating units
GGGSGGGSGGGSGGGSGGGSGGGSGGGSGGGSGGGSGGGSGGGSGGGSGGGSGGGSGGGSGGGSGGGSGGGSGGGSGGGS

SEQ ID NO: 9384 - protein, 100 aa, Artificial Sequence
  Description of Artificial Sequence: Synthetic polypeptide
  SITE (1)..(100): This sequence may encompass 1-20 "Gly Gly Gly Gly Ser" repeating units
GGGGSGGGGSGGGGSGGGGSGGGGSGGGGSGGGGSGGGGSGGGGSGGGGSGGGGSGGGGSGGGGSGGGGSGGGGSGGGGSGGGGSGGGGSGGGGSGGGGS

SEQ ID NO: 9385 - protein, 10 aa, Artificial Sequence
  Description of Artificial Sequence: Synthetic peptide
  SITE (1)..(10): This sequence may encompass 1-10 residues
GGGGGGGGGG

SEQ ID NO: 9386 - protein, 20 aa, Artificial Sequence
  Description of Artificial Sequence: Synthetic peptide
  SITE (1)..(20): This sequence may encompass 1-10 "Gly Ser" repeating units
GSGSGSGSGSGSGSGSGSGS

SEQ ID NO: 9387 - protein, 30 aa, Artificial Sequence
  Description of Artificial Sequence: Synthetic polypeptide
  SITE (1)..(30): This sequence may encompass 1-10 "Gly Gly Ser" repeating units
GGSGGSGGSGGSGGSGGSGGSGGSGGSGGS

SEQ ID NO: 9388 - protein, 40 aa, Artificial Sequence
  Description of Artificial Sequence: Synthetic polypeptide
  SITE (1)..(40): This sequence may encompass 1-10 "Gly Gly Gly Ser" repeating units
GGGSGGGSGGGSGGGSGGGSGGGSGGGSGGGSGGGSGGGS

SEQ ID NO: 9389 - protein, 50 aa, Artificial Sequence
  Description of Artificial Sequence: Synthetic polypeptide
  SITE (1)..(50): This sequence may encompass 1-10 "Gly Gly Gly Gly Ser" repeating units
GGGGSGGGGSGGGGSGGGGSGGGGSGGGGSGGGGSGGGGSGGGGSGGGGS

SEQ ID NO: 9390 - protein, 5 aa, Artificial Sequence
  Description of Artificial Sequence: Synthetic peptide
  SITE (1)..(5): This sequence may encompass 1-5 residues
GGGGG

SEQ ID NO: 9391 - protein, 10 aa, Artificial Sequence
  Description of Artificial Sequence: Synthetic peptide
  SITE (1)..(10): This sequence may encompass 1-5 "Gly Ser" repeating units
GSGSGSGSGS

SEQ ID NO: 9392 - protein, 15 aa, Artificial Sequence
  Description of Artificial Sequence: Synthetic peptide
  SITE (1)..(15): This sequence may encompass 1-5 "Gly Gly Ser" repeating units
GGSGGSGGSGGSGGS

SEQ ID NO: 9393 - protein, 20 aa, Artificial Sequence
  Description of Artificial Sequence: Synthetic peptide
  SITE (1)..(20): This sequence may encompass 1-5 "Gly Gly Gly Ser" repeating units
GGGSGGGSGGGSGGGSGGGS

SEQ ID NO: 9394 - protein, 25 aa, Artificial Sequence
  Description of Artificial Sequence: Synthetic peptide
  SITE (1)..(25): This sequence may encompass 1-5 "Gly Gly Gly Gly Ser" repeating units
GGGGSGGGGSGGGGSGGGGSGGGGS

SEQ ID NO: 9395 - protein, 5 aa, Artificial Sequence
  Description of Artificial Sequence: Synthetic peptide
GGGGS

SEQ ID NO: 9396 - protein, 10 aa, Artificial Sequence
  Description of Artificial Sequence: Synthetic peptide
GGGGSGGGGS

SEQ ID NO: 9397 - protein, 15 aa, Artificial Sequence
  Description of Artificial Sequence: Synthetic peptide
GGGGSGGGGSGGGGS

SEQ ID NO: 9398 - protein, 20 aa, Artificial Sequence
  Description of Artificial Sequence: Synthetic peptide
GGGGSGGGGSGGGGSGGGGS

SEQ ID NO: 9399 - protein, 2 aa, Artificial Sequence
  Description of Artificial Sequence: Synthetic peptide
GG

SEQ ID NO: 9400 - protein, 3 aa, Artificial Sequence
  Description of Artificial Sequence: Synthetic peptide
GGG

SEQ ID NO: 9401 - protein, 5 aa, Artificial Sequence
  Description of Artificial Sequence: Synthetic peptide
GGGGG

SEQ ID NO: 9402 - protein, 3 aa, Artificial Sequence
  Description of Artificial Sequence: Synthetic peptide
GGS

SEQ ID NO: 9403 - protein, 4 aa, Artificial Sequence
  Description of Artificial Sequence: Synthetic peptide
GGGS

SEQ ID NO: 9404 - protein, 7 aa, Artificial Sequence
  Description of Artificial Sequence: Synthetic peptide
GGGGSGG

SEQ ID NO: 9405 - protein, 6 aa, Artificial Sequence
  Description of Artificial Sequence: Synthetic peptide
GGSGGS

SEQ ID NO: 9406 - protein, 5 aa, Artificial Sequence
  Description of Artificial Sequence: Synthetic peptide
GGGGG

SEQ ID NO: 9407 - protein, 20 aa, Artificial Sequence
  Description of Artificial Sequence: Synthetic peptide
GSGSGSGSGSGSGSGSGSGS

SEQ ID NO: 9408-9417 - skipped (10 entries)

SEQ ID NO: 9418 - protein, 100 aa, Artificial Sequence
  Description of Artificial Sequence: Synthetic polypeptide
  SITE (1)..(100): This sequence may encompass 1-50 "Pro Ala" repeating units
PAPAPAPAPAPAPAPAPAPAPAPAPAPAPAPAPAPAPAPAPAPAPAPAPAPAPAPAPAPAPAPAPAPAPAPAPAPAPAPAPAPAPAPAPAPAPAPAPAPA

SEQ ID NO: 9419 - protein, 50 aa, Artificial Sequence
  Description of Artificial Sequence: Synthetic polypeptide
  SITE (1)..(50): This sequence may encompass 1-50 residues
PPPPPPPPPPPPPPPPPPPPPPPPPPPPPPPPPPPPPPPPPPPPPPPPPP

SEQ ID NO: 9420 - protein, 20 aa, Artificial Sequence
  Description of Artificial Sequence: Synthetic peptide
  SITE (1)..(20): This sequence may encompass 1-20 residues
PPPPPPPPPPPPPPPPPPPP

SEQ ID NO: 9421 - protein, 40 aa, Artificial Sequence
  Description of Artificial Sequence: Synthetic polypeptide
  SITE (1)..(40): This sequence may encompass 1-20 "Pro Ala" repeating units
PAPAPAPAPAPAPAPAPAPAPAPAPAPAPAPAPAPAPAPA

SEQ ID NO: 9422 - protein, 10 aa, Artificial Sequence
  Description of Artificial Sequence: Synthetic peptide
  SITE (1)..(10): This sequence may encompass 1-10 residues
PPPPPPPPPP

SEQ ID NO: 9423 - protein, 20 aa, Artificial Sequence
  Description of Artificial Sequence: Synthetic peptide
  SITE (1)..(20): This sequence may encompass 1-10 "Pro Ala" repeating units
PAPAPAPAPAPAPAPAPAPA

SEQ ID NO: 9424 - protein, 5 aa, Artificial Sequence
  Description of Artificial Sequence: Synthetic peptide
  SITE (1)..(5): This sequence may encompass 1-5 residues
PPPPP

SEQ ID NO: 9425 - protein, 10 aa, Artificial Sequence
  Description of Artificial Sequence: Synthetic peptide
  SITE (1)..(10): This sequence may encompass 1-5 "Pro Ala" repeating units
PAPAPAPAPA

SEQ ID NO: 9426 - protein, 10 aa, Artificial Sequence
  Description of Artificial Sequence: Synthetic peptide
PAPAPAPAPA

SEQ ID NO: 9427 - protein, 14 aa, Artificial Sequence
  Description of Artificial Sequence: Synthetic peptide
PAPAPAPAPAPAPA

SEQ ID NO: 9428 - protein, 20 aa, Artificial Sequence
  Description of Artificial Sequence: Synthetic peptide
PAPAPAPAPAPAPAPAPAPA

SEQ ID NO: 9429 - protein, 4 aa, Artificial Sequence
  Description of Artificial Sequence: Synthetic peptide
  SITE (1)..(4): This sequence may encompass 1-4 residues
GGGG

SEQ ID NO: 9430 - protein, 5 aa, Artificial Sequence
  Description of Artificial Sequence: Synthetic peptide
  SITE (1)..(5): This sequence may encompass 1-5 residues
GGGGG

SEQ ID NO: 9431 - protein, 6 aa, Artificial Sequence
  Description of Artificial Sequence: Synthetic 6xHis tag
HHHHHH

SEQ ID NO: 9432 - protein, 12 aa, Artificial Sequence
  Description of Artificial Sequence: Synthetic peptide
APAPAPAPAPAP

SEQ ID NO: 9433-9439 - skipped (7 entries)

SEQ ID NO: 9440 - protein, 2 aa, Artificial Sequence
  Description of Artificial Sequence: Synthetic peptide
  See specification as filed for detailed description of substitutions and preferred embodiments
PA

SEQ ID NO: 9441 - protein, 2 aa, Artificial Sequence
  Description of Artificial Sequence: Synthetic peptide
  MOD_RES (2)..(2): Ala, Lys, or Glu
  See specification as filed for detailed description of substitutions and preferred embodiments
PX

SEQ ID NO: 9442 - protein, 8 aa, Artificial Sequence
  Description of Artificial Sequence: Synthetic peptide
PAPAPAPA

SEQ ID NO: 9443 - protein, 12 aa, Artificial Sequence
  Description of Artificial Sequence: Synthetic peptide
PAPAPAPAPAPA

SEQ ID NO: 9444 - protein, 16 aa, Artificial Sequence
  Description of Artificial Sequence: Synthetic peptide
PAPAPAPAPAPAPAPA

SEQ ID NO: 9445 - protein, 18 aa, Artificial Sequence
  Description of Artificial Sequence: Synthetic peptide
PAPAPAPAPAPAPAPAPA

SEQ ID NO: 9446 - protein, 22 aa, Artificial Sequence
  Description of Artificial Sequence: Synthetic peptide
PAPAPAPAPAPAPAPAPAPAPA

SEQ ID NO: 9447 - protein, 24 aa, Artificial Sequence
  Description of Artificial Sequence: Synthetic peptide
PAPAPAPAPAPAPAPAPAPAPAPA

SEQ ID NO: 9448 - protein, 38 aa, Artificial Sequence
  Description of Artificial Sequence: Synthetic polypeptide
GGRYVHDCFIAQVGALCDLFLHPAPAPAPAPAPAPAPA

SEQ ID NO: 9449 - protein, 16 aa, Artificial Sequence
  Description of Artificial Sequence: Synthetic peptide
VVCQDWEGVELCWQGG

SEQ ID NO: 9450 - protein, 38 aa, Artificial Sequence
  Description of Artificial Sequence: Synthetic polypeptide
GGRYVHACFIAQVGDLCDLFLHPAPAPAPAPAPAPAPA

SEQ ID NO: 9451 - protein, 38 aa, Artificial Sequence
  Description of Artificial Sequence: Synthetic polypeptide
GGRYVHDCFIAQVGDLCDLALHPAPAPAPAPAPAPAPA

SEQ ID NO: 9452 - protein, 16 aa, Artificial Sequence
  Description of Artificial Sequence: Synthetic peptide
  See specification as filed for detailed description of substitutions and preferred embodiments
GVVCQDWEGVELCWQG

SEQ ID NO: 9453 - protein, 16 aa, Artificial Sequence
  Description of Artificial Sequence: Synthetic peptide
  See specification as filed for detailed description of substitutions and preferred embodiments
GVVCQDWEGVELCWQG

1-65. (canceled)

66. An IL-2Rβγc ligand comprising:
the IL-2Rβ ligand having greater than 60% amino acid sequence similarity to the IL-2Rβ ligand having any one of SEQ ID NOS: 2859, 2934, 3100-3128, 3130-3151, 3160-3166, 3170-3186, and 3200-3207; and
an IL-2Rγc ligand having greater than 60% sequence similarity to any one of SEQ ID NOS: 944-1028, 1032-1060, and 1601-1613.

67. The IL-2Rβ ligand of claim 66, wherein the IL-2Rβ ligand comprises an amino acid sequence of any one of SEQ ID NOS: 2859, 2934, 3100-3128, 3130-3151, 3160-3166, 3170-3186, and 3200-3207.

68. The IL-2Rβγc ligand of claim 66, wherein the IL-2Rβ ligand has an amino acid sequence selected from SEQ ID NO: 2858 and SEQ ID NO: 2859.

69. The IL-2Rβγc ligand of claim 66, wherein the IL-2Rβ ligand has an amino acid sequence having greater than 60% sequence similarity to an amino acid sequence selected from SEQ ID NO: 2858 and SEQ ID NO: 2859.

70. The IL-2Rβγc ligand of claim 66, wherein the IL-2Rβ ligand independently comprises from 1 to 4 flanking glycines on the C-terminus, on the N-terminus, or on both the C-terminus and the N terminus.

71. The IL-2Rβγc ligand of claim 66, wherein the IL-2Rγc ligand comprises an amino acid sequence of any one of any one of SEQ ID NOS: 944-1028, 1032-1060, and 1601-1613.

72. The IL-2Rβγc ligand of claim 66, wherein the IL-2Rγc ligand comprises an amino acid sequence of any one of SEQ ID NOS: 944-1028, 1032-1060, and 1601-1613 having from 1 to 4 amino acid substitutions.

73. The IL-2Rβγc ligand of claim 66, wherein the IL-2Rγc ligand comprises an amino acid sequence of any one of SEQ ID NOS: 944-1028, 1032-1060, and 1601-1613 having from 1 to 4 flanking glycines.

74. The IL-2Rβγc ligand of claim 66, wherein the IL-2Rγc ligand comprises:
an amino acid sequence of SEQ ID NO: 965;
a truncated amino acid sequence of SEQ ID NO: 965;
an amino acid sequence of SEQ ID NO: 965 having from 1 to 4 amino acid substitutions;
an amino acid sequence of SEQ ID NO: 965 having from 1 to 4 flanking glycines;
an amino acid sequence having greater than 60% sequence similarity to SEQ ID NO: 965; or
a combination of any of the foregoing.

75. The IL-2Rβγc ligand of claim 66, wherein,
the IL-2Rβ ligand comprises amino acid sequence selected from SEQ ID NO: 2858 and SEQ ID NO: 2859; and
the IL-2Rγc ligand comprises the amino acid sequence of SEQ ID NO: 965.

76. The IL-2Rβγc ligand of claim 66, wherein, the IL-2Rβγc ligand comprises the amino acid sequence of any one of SEQ ID NOS: 4100-4137, 4160-4168, and 4170-4185.

77. The IL-2Rβγc ligand of claim 66, wherein the IL-2Rβγc ligand has greater than 60% sequence similarity to an amino acid sequence selected from any one of SEQ ID NOS: 4100-4137, 4160-4168, and 4170-4185.

78. The IL-2Rβγc ligand of claim 66, wherein the IL-2Rβ ligand is bound to the IL-2Rγc ligand through a rigid ligand linker.

79. The IL-2Rβγc ligand of claim 78, wherein the rigid ligand linker comprises (P)n where n is an integer from 1 to 50 (SEQ ID NO: 9419) or (PA)n where n is an integer from 1 to 50 (SEQ ID NO: 9418).

80. An IL-2Rβγc binding compound comprising the IL-2Rβγc ligand of claim 66.

81. The IL-2Rβγc binding compound of claim 80, wherein the IL-2Rβγc ligand is bound to a construct partner.

82. The IL-2Rβγc binding compound of claim 81, wherein the construct partner is selected from an IgG Fc fragment, a ZW1_A fragment, a Cys-Hole fragment, a Cys-Knob fragment, an antibody, and a protein.

83. The IL-2Rβγc binding compound of claim 80, wherein the IL-2Rβγc binding compound binds to hu-IL-2R with an IC50 less than 100 μM as determined using a phage ELISA competition assay.

84. The IL-2Rβγc binding compound of claim 80, wherein the IL-2Rβγc binding compound binds to cyno-IL-2R with an IC50 less than 100 μM as determined using a phage ELISA competition assay.

85. The IL-2Rβγc binding compound of claim 80, wherein the IL-2Rβγc binding compound is a hu-IL-2R agonist.

86. The IL-2Rβγc binding compound of claim 80, wherein the IL-2Rβγc binding compound is a cyno-IL-2R agonist.

87. An IL-2Rβγc binding compound, wherein the IL-2Rβγc binding compound comprises an amino acid sequence having greater than 60% sequence similarity to any one of SEQ ID NOS: 8100-8136.

88. An IL-2Rβγc binding compound, wherein the IL-2Rβγc binding compound comprises an amino acid sequence of any one of SEQ ID NOS: 8100-8136.

89. A pharmaceutical composition comprising the IL-2Rβγc ligand of claim 66.

90. A pharmaceutical composition comprising the IL-2Rβγc binding compound of claim 80.

91. A pharmaceutical composition comprising the IL-2Rβγc binding compound of claim 87.

92. A method of treating a disease in a patient comprising administering to a patient in need of such treatment a therapeutically effective amount of the IL-2Rβγc ligand of claim 66, wherein the disease is selected from cancer, an autoimmune disease, an inflammatory disease, an infectious disease, and a viral disease.

93. A method of treating a disease in a patient comprising administering to a patient in need of such treatment a therapeutically effective amount of the IL-Wye binding compound of claim 80, wherein the disease is selected from cancer, an autoimmune disease, an inflammatory disease, an infectious disease, and a viral disease.

94. A method of treating a disease in a patient comprising administering to a patient in need of such treatment a therapeutically effective amount of the IL-Wye binding compound of claim 87, wherein the disease is selected from cancer, an autoimmune disease, an inflammatory disease, an infectious disease, and a viral disease.
